United States Patent Application Publication US 2021/0139889 A1 - sequence listing, part 3

SEQ ID NO: 17657 - DNA, 301 bp, Artificial Sequence
  Kdm6a.4_NTC.48
  crRNA array
  misc_feature (148)..(157): n is a, c, g, or t
cttggctttatatatcttgtggaaaggacgaaacaccgtaatttctactaagtgtagattgtctcctacgaatcccccctaatttctactaagtgtagatcggtcgactacggctgttagtaatttctactaagtgtagatttttttnnnnnnnnnnaagcttggcgtggatccgatatcaactagatcttgagacaaatggcagtattcatccacaattttaaaagaaaaggggggattggggggtacagtgcaggggaaagaatagtagacataatagcaacagacatacaaactaaag

SEQ ID NO: 17658 - DNA, 301 bp, Artificial Sequence
  Kdm6a.4_NTC.49
  crRNA array
  misc_feature (148)..(157): n is a, c, g, or t
cttggctttatatatcttgtggaaaggacgaaacaccgtaatttctactaagtgtagattgtctcctacgaatcccccctaatttctactaagtgtagattcggggcgcgtcaactgaattaatttctactaagtgtagatttttttnnnnnnnnnnaagcttggcgtggatccgatatcaactagatcttgagacaaatggcagtattcatccacaattttaaaagaaaaggggggattggggggtacagtgcaggggaaagaatagtagacataatagcaacagacatacaaactaaag

SEQ ID NO: 17659 - DNA, 301 bp, Artificial Sequence
  Kdm6a.4_NTC.5
  crRNA array
  misc_feature (148)..(157): n is a, c, g, or t
cttggctttatatatcttgtggaaaggacgaaacaccgtaatttctactaagtgtagattgtctcctacgaatcccccctaatttctactaagtgtagatgcttacgcgtcgcgaatgtataatttctactaagtgtagatttttttnnnnnnnnnnaagcttggcgtggatccgatatcaactagatcttgagacaaatggcagtattcatccacaattttaaaagaaaaggggggattggggggtacagtgcaggggaaagaatagtagacataatagcaacagacatacaaactaaag

SEQ ID NO: 17660 - DNA, 301 bp, Artificial Sequence
  Kdm6a.4_NTC.50
  crRNA array
  misc_feature (148)..(157): n is a, c, g, or t
cttggctttatatatcttgtggaaaggacgaaacaccgtaatttctactaagtgtagattgtctcctacgaatcccccctaatttctactaagtgtagatattgccgctcgcgcaaaatctaatttctactaagtgtagatttttttnnnnnnnnnnaagcttggcgtggatccgatatcaactagatcttgagacaaatggcagtattcatccacaattttaaaagaaaaggggggattggggggtacagtgcaggggaaagaatagtagacataatagcaacagacatacaaactaaag

SEQ ID NO: 17661 - DNA, 301 bp, Artificial Sequence
  Kdm6a.4_NTC.51
  crRNA array
  misc_feature (148)..(157): n is a, c, g, or t
cttggctttatatatcttgtggaaaggacgaaacaccgtaatttctactaagtgtagattgtctcctacgaatcccccctaatttctactaagtgtagattaacgcgcaacacgccaatgtaatttctactaagtgtagatttttttnnnnnnnnnnaagcttggcgtggatccgatatcaactagatcttgagacaaatggcagtattcatccacaattttaaaagaaaaggggggattggggggtacagtgcaggggaaagaatagtagacataatagcaacagacatacaaactaaag

SEQ ID NO: 17662 - DNA, 301 bp, Artificial Sequence
  Kdm6a.4_NTC.6
  crRNA array
  misc_feature (148)..(157): n is a, c, g, or t
cttggctttatatatcttgtggaaaggacgaaacaccgtaatttctactaagtgtagattgtctcctacgaatcccccctaatttctactaagtgtagatcgaatcgcgcctacgggaattaatttctactaagtgtagatttttttnnnnnnnnnnaagcttggcgtggatccgatatcaactagatcttgagacaaatggcagtattcatccacaattttaaaagaaaaggggggattggggggtacagtgcaggggaaagaatagtagacataatagcaacagacatacaaactaaag

SEQ ID NO: 17663 - DNA, 301 bp, Artificial Sequence
  Kdm6a.4_NTC.7
  crRNA array
  misc_feature (148)..(157): n is a, c, g, or t
cttggctttatatatcttgtggaaaggacgaaacaccgtaatttctactaagtgtagattgtctcctacgaatcccccctaatttctactaagtgtagatcgccgaacggataagactattaatttctactaagtgtagatttttttnnnnnnnnnnaagcttggcgtggatccgatatcaactagatcttgagacaaatggcagtattcatccacaattttaaaagaaaaggggggattggggggtacagtgcaggggaaagaatagtagacataatagcaacagacatacaaactaaag

SEQ ID NO: 17664 - DNA, 301 bp, Artificial Sequence
  Kdm6a.4_NTC.8
  crRNA array
  misc_feature (148)..(157): n is a, c, g, or t
cttggctttatatatcttgtggaaaggacgaaacaccgtaatttctactaagtgtagattgtctcctacgaatcccccctaatttctactaagtgtagatcgaccgaggttacgctgggataatttctactaagtgtagatttttttnnnnnnnnnnaagcttggcgtggatccgatatcaactagatcttgagacaaatggcagtattcatccacaattttaaaagaaaaggggggattggggggtacagtgcaggggaaagaatagtagacataatagcaacagacatacaaactaaag

SEQ ID NO: 17665 - DNA, 301 bp, Artificial Sequence
  Kdm6a.4_NTC.9
  crRNA array
  misc_feature (148)..(157): n is a, c, g, or t
cttggctttatatatcttgtggaaaggacgaaacaccgtaatttctactaagtgtagattgtctcctacgaatcccccctaatttctactaagtgtagatatcgccgtacggctatggcataatttctactaagtgtagatttttttnnnnnnnnnnaagcttggcgtggatccgatatcaactagatcttgagacaaatggcagtattcatccacaattttaaaagaaaaggggggattggggggtacagtgcaggggaaagaatagtagacataatagcaacagacatacaaactaaag

SEQ ID NO: 17666 - DNA, 301 bp, Artificial Sequence
  Kmt2c.1_NTC.0
  crRNA array
  misc_feature (148)..(157): n is a, c, g, or t
cttggctttatatatcttgtggaaaggacgaaacaccgtaatttctactaagtgtagatactcgacctccacctccctataatttctactaagtgtagattatagcgtcgcgcgctaatttaatttctactaagtgtagatttttttnnnnnnnnnnaagcttggcgtggatccgatatcaactagatcttgagacaaatggcagtattcatccacaattttaaaagaaaaggggggattggggggtacagtgcaggggaaagaatagtagacataatagcaacagacatacaaactaaag

SEQ ID NO: 17667 - DNA, 301 bp, Artificial Sequence
  Kmt2c.1_NTC.1
  crRNA array
  misc_feature (148)..(157): n is a, c, g, or t
cttggctttatatatcttgtggaaaggacgaaacaccgtaatttctactaagtgtagatactcgacctccacctccctataatttctactaagtgtagatcgcgtaaccgttccggctcctaatttctactaagtgtagatttttttnnnnnnnnnnaagcttggcgtggatccgatatcaactagatcttgagacaaatggcagtattcatccacaattttaaaagaaaaggggggattggggggtacagtgcaggggaaagaatagtagacataatagcaacagacatacaaactaaag

SEQ ID NO: 17668 - DNA, 301 bp, Artificial Sequence
  Kmt2c.1_NTC.10
  crRNA array
  misc_feature (148)..(157): n is a, c, g, or t
cttggctttatatatcttgtggaaaggacgaaacaccgtaatttctactaagtgtagatactcgacctccacctccctataatttctactaagtgtagatcgctaagttcgcgcgggccgtaatttctactaagtgtagatttttttnnnnnnnnnnaagcttggcgtggatccgatatcaactagatcttgagacaaatggcagtattcatccacaattttaaaagaaaaggggggattggggggtacagtgcaggggaaagaatagtagacataatagcaacagacatacaaactaaag

SEQ ID NO: 17669 - DNA, 301 bp, Artificial Sequence
  Kmt2c.1_NTC.11
  crRNA array
  misc_feature (148)..(157): n is a, c, g, or t
cttggctttatatatcttgtggaaaggacgaaacaccgtaatttctactaagtgtagatactcgacctccacctccctataatttctactaagtgtagatcgttcgtcgacgaagcaatctaatttctactaagtgtagatttttttnnnnnnnnnnaagcttggcgtggatccgatatcaactagatcttgagacaaatggcagtattcatccacaattttaaaagaaaaggggggattggggggtacagtgcaggggaaagaatagtagacataatagcaacagacatacaaactaaag

SEQ ID NO: 17670 - DNA, 301 bp, Artificial Sequence
  Kmt2c.1_NTC.12
  crRNA array
  misc_feature (148)..(157): n is a, c, g, or t
cttggctttatatatcttgtggaaaggacgaaacaccgtaatttctactaagtgtagatactcgacctccacctccctataatttctactaagtgtagatcgccgacgattaatcaatagtaatttctactaagtgtagatttttttnnnnnnnnnnaagcttggcgtggatccgatatcaactagatcttgagacaaatggcagtattcatccacaattttaaaagaaaaggggggattggggggtacagtgcaggggaaagaatagtagacataatagcaacagacatacaaactaaag

SEQ ID NO: 17671 - DNA, 301 bp, Artificial Sequence
  Kmt2c.1_NTC.13
  crRNA array
  misc_feature (148)..(157): n is a, c, g, or t
cttggctttatatatcttgtggaaaggacgaaacaccgtaatttctactaagtgtagatactcgacctccacctccctataatttctactaagtgtagatgaccgttgtatcgcgatcaataatttctactaagtgtagatttttttnnnnnnnnnnaagcttggcgtggatccgatatcaactagatcttgagacaaatggcagtattcatccacaattttaaaagaaaaggggggattggggggtacagtgcaggggaaagaatagtagacataatagcaacagacatacaaactaaag

SEQ ID NO: 17672 - DNA, 301 bp, Artificial Sequence
  Kmt2c.1_NTC.14
  crRNA array
  misc_feature (148)..(157): n is a, c, g, or t
cttggctttatatatcttgtggaaaggacgaaacaccgtaatttctactaagtgtagatactcgacctccacctccctataatttctactaagtgtagatccgttcgtgcgatagtgttttaatttctactaagtgtagatttttttnnnnnnnnnnaagcttggcgtggatccgatatcaactagatcttgagacaaatggcagtattcatccacaattttaaaagaaaaggggggattggggggtacagtgcaggggaaagaatagtagacataatagcaacagacatacaaactaaag

SEQ ID NO: 17673 - DNA, 301 bp, Artificial Sequence
  Kmt2c.1_NTC.15
  crRNA array
  misc_feature (148)..(157): n is a, c, g, or t
cttggctttatatatcttgtggaaaggacgaaacaccgtaatttctactaagtgtagatactcgacctccacctccctataatttctactaagtgtagatgttgtcgtgccgcgaatttataatttctactaagtgtagatttttttnnnnnnnnnnaagcttggcgtggatccgatatcaactagatcttgagacaaatggcagtattcatccacaattttaaaagaaaaggggggattggggggtacagtgcaggggaaagaatagtagacataatagcaacagacatacaaactaaag

SEQ ID NO: 17674 - DNA, 301 bp, Artificial Sequence
  Kmt2c.1_NTC.16
  crRNA array
  misc_feature (148)..(157): n is a, c, g, or t
cttggctttatatatcttgtggaaaggacgaaacaccgtaatttctactaagtgtagatactcgacctccacctccctataatttctactaagtgtagatcggtacgttagacgaaaatttaatttctactaagtgtagatttttttnnnnnnnnnnaagcttggcgtggatccgatatcaactagatcttgagacaaatggcagtattcatccacaattttaaaagaaaaggggggattggggggtacagtgcaggggaaagaatagtagacataatagcaacagacatacaaactaaag

SEQ ID NO: 17675 - DNA, 301 bp, Artificial Sequence
  Kmt2c.1_NTC.17
  crRNA array
  misc_feature (148)..(157): n is a, c, g, or t
cttggctttatatatcttgtggaaaggacgaaacaccgtaatttctactaagtgtagatactcgacctccacctccctataatttctactaagtgtagattatcgaacgctatcgaacgttaatttctactaagtgtagatttttttnnnnnnnnnnaagcttggcgtggatccgatatcaactagatcttgagacaaatggcagtattcatccacaattttaaaagaaaaggggggattggggggtacagtgcaggggaaagaatagtagacataatagcaacagacatacaaactaaag

SEQ ID NO: 17676 - DNA, 301 bp, Artificial Sequence
  Kmt2c.1_NTC.18
  crRNA array
  misc_feature (148)..(157): n is a, c, g, or t
cttggctttatatatcttgtggaaaggacgaaacaccgtaatttctactaagtgtagatactcgacctccacctccctataatttctactaagtgtagattccggttacgaccggcaaaataatttctactaagtgtagatttttttnnnnnnnnnnaagcttggcgtggatccgatatcaactagatcttgagacaaatggcagtattcatccacaattttaaaagaaaaggggggattggggggtacagtgcaggggaaagaatagtagacataatagcaacagacatacaaactaaag

SEQ ID NO: 17677 - DNA, 301 bp, Artificial Sequence
  Kmt2c.1_NTC.19
  crRNA array
  misc_feature (148)..(157): n is a, c, g, or t
cttggctttatatatcttgtggaaaggacgaaacaccgtaatttctactaagtgtagatactcgacctccacctccctataatttctactaagtgtagatcgtcgtagaacgatacccgataatttctactaagtgtagatttttttnnnnnnnnnnaagcttggcgtggatccgatatcaactagatcttgagacaaatggcagtattcatccacaattttaaaagaaaaggggggattggggggtacagtgcaggggaaagaatagtagacataatagcaacagacatacaaactaaag

SEQ ID NO: 17678 - DNA, 301 bp, Artificial Sequence
  Kmt2c.1_NTC.2
  crRNA array
  misc_feature (148)..(157): n is a, c, g, or t
cttggctttatatatcttgtggaaaggacgaaacaccgtaatttctactaagtgtagatactcgacctccacctccctataatttctactaagtgtagatttatgtcgcgccgcgacccgtaatttctactaagtgtagatttttttnnnnnnnnnnaagcttggcgtggatccgatatcaactagatcttgagacaaatggcagtattcatccacaattttaaaagaaaaggggggattggggggtacagtgcaggggaaagaatagtagacataatagcaacagacatacaaactaaag

SEQ ID NO: 17679 - DNA, 301 bp, Artificial Sequence
  Kmt2c.1_NTC.20
  crRNA array
  misc_feature (148)..(157): n is a, c, g, or t
cttggctttatatatcttgtggaaaggacgaaacaccgtaatttctactaagtgtagatactcgacctccacctccctataatttctactaagtgtagatattccggcgcgaccagaagataatttctactaagtgtagatttttttnnnnnnnnnnaagcttggcgtggatccgatatcaactagatcttgagacaaatggcagtattcatccacaattttaaaagaaaaggggggattggggggtacagtgcaggggaaagaatagtagacataatagcaacagacatacaaactaaag

SEQ ID NO: 17680 - DNA, 301 bp, Artificial Sequence
  Kmt2c.1_NTC.21
  crRNA array
  misc_feature (148)..(157): n is a, c, g, or t
cttggctttatatatcttgtggaaaggacgaaacaccgtaatttctactaagtgtagatactcgacctccacctccctataatttctactaagtgtagatgtataacttcgcgcggtccgtaatttctactaagtgtagatttttttnnnnnnnnnnaagcttggcgtggatccgatatcaactagatcttgagacaaatggcagtattcatccacaattttaaaagaaaaggggggattggggggtacagtgcaggggaaagaatagtagacataatagcaacagacatacaaactaaag

SEQ ID NO: 17681 - DNA, 301 bp, Artificial Sequence
  Kmt2c.1_NTC.22
  crRNA array
  misc_feature (148)..(157): n is a, c, g, or t
cttggctttatatatcttgtggaaaggacgaaacaccgtaatttctactaagtgtagatactcgacctccacctccctataatttctactaagtgtagatgcgcgtcaacgtaatgtgcctaatttctactaagtgtagatttttttnnnnnnnnnnaagcttggcgtggatccgatatcaactagatcttgagacaaatggcagtattcatccacaattttaaaagaaaaggggggattggggggtacagtgcaggggaaagaatagtagacataatagcaacagacatacaaactaaag

SEQ ID NO: 17682 - DNA, 301 bp, Artificial Sequence
  Kmt2c.1_NTC.23
  crRNA array
  misc_feature (148)..(157): n is a, c, g, or t
cttggctttatatatcttgtggaaaggacgaaacaccgtaatttctactaagtgtagatactcgacctccacctccctataatttctactaagtgtagatacgcgctattatcgtaggtgtaatttctactaagtgtagatttttttnnnnnnnnnnaagcttggcgtggatccgatatcaactagatcttgagacaaatggcagtattcatccacaattttaaaagaaaaggggggattggggggtacagtgcaggggaaagaatagtagacataatagcaacagacatacaaactaaag

SEQ ID NO: 17683 - DNA, 301 bp, Artificial Sequence
  Kmt2c.1_NTC.24
  crRNA array
  misc_feature (148)..(157): n is a, c, g, or t
cttggctttatatatcttgtggaaaggacgaaacaccgtaatttctactaagtgtagatactcgacctccacctccctataatttctactaagtgtagatactatcgacgttcgtcccggtaatttctactaagtgtagatttttttnnnnnnnnnnaagcttggcgtggatccgatatcaactagatcttgagacaaatggcagtattcatccacaattttaaaagaaaaggggggattggggggtacagtgcaggggaaagaatagtagacataatagcaacagacatacaaactaaag

SEQ ID NO: 17684 - DNA, 301 bp, Artificial Sequence
  Kmt2c.1_NTC.25
  crRNA array
  misc_feature (148)..(157): n is a, c, g, or t
cttggctttatatatcttgtggaaaggacgaaacaccgtaatttctactaagtgtagatactcgacctccacctccctataatttctactaagtgtagattcgcgttatcgtgccgtgcgtaatttctactaagtgtagatttttttnnnnnnnnnnaagcttggcgtggatccgatatcaactagatcttgagacaaatggcagtattcatccacaattttaaaagaaaaggggggattggggggtacagtgcaggggaaagaatagtagacataatagcaacagacatacaaactaaag

SEQ ID NO: 17685 - DNA, 301 bp, Artificial Sequence
  Kmt2c.1_NTC.26
  crRNA array
  misc_feature (148)..(157): n is a, c, g, or t
cttggctttatatatcttgtggaaaggacgaaacaccgtaatttctactaagtgtagatactcgacctccacctccctataatttctactaagtgtagatcgcgacggcggttttaacactaatttctactaagtgtagatttttttnnnnnnnnnnaagcttggcgtggatccgatatcaactagatcttgagacaaatggcagtattcatccacaattttaaaagaaaaggggggattggggggtacagtgcaggggaaagaatagtagacataatagcaacagacatacaaactaaag

SEQ ID NO: 17686 - DNA, 301 bp, Artificial Sequence
  Kmt2c.1_NTC.27
  crRNA array
  misc_feature (148)..(157): n is a, c, g, or t
cttggctttatatatcttgtggaaaggacgaaacaccgtaatttctactaagtgtagatactcgacctccacctccctataatttctactaagtgtagatgtcgcgttgcgaccggcgcttaatttctactaagtgtagatttttttnnnnnnnnnnaagcttggcgtggatccgatatcaactagatcttgagacaaatggcagtattcatccacaattttaaaagaaaaggggggattggggggtacagtgcaggggaaagaatagtagacataatagcaacagacatacaaactaaag

SEQ ID NO: 17687 - DNA, 301 bp, Artificial Sequence
  Kmt2c.1_NTC.28
  crRNA array
  misc_feature (148)..(157): n is a, c, g, or t
cttggctttatatatcttgtggaaaggacgaaacaccgtaatttctactaagtgtagatactcgacctccacctccctataatttctactaagtgtagataccgctaatcggcgtaaacttaatttctactaagtgtagatttttttnnnnnnnnnnaagcttggcgtggatccgatatcaactagatcttgagacaaatggcagtattcatccacaattttaaaagaaaaggggggattggggggtacagtgcaggggaaagaatagtagacataatagcaacagacatacaaactaaag

SEQ ID NO: 17688 - DNA, 301 bp, Artificial Sequence
  Kmt2c.1_NTC.29
  crRNA array
  misc_feature (148)..(157): n is a, c, g, or t
cttggctttatatatcttgtggaaaggacgaaacaccgtaatttctactaagtgtagatactcgacctccacctccctataatttctactaagtgtagatcgcgatctataccgtctatataatttctactaagtgtagatttttttnnnnnnnnnnaagcttggcgtggatccgatatcaactagatcttgagacaaatggcagtattcatccacaattttaaaagaaaaggggggattggggggtacagtgcaggggaaagaatagtagacataatagcaacagacatacaaactaaag

SEQ ID NO: 17689 - DNA, 301 bp, Artificial Sequence
  Kmt2c.1_NTC.3
  crRNA array
  misc_feature (148)..(157): n is a, c, g, or t
cttggctttatatatcttgtggaaaggacgaaacaccgtaatttctactaagtgtagatactcgacctccacctccctataatttctactaagtgtagattcgacgcgagacgacgtacataatttctactaagtgtagatttttttnnnnnnnnnnaagcttggcgtggatccgatatcaactagatcttgagacaaatggcagtattcatccacaattttaaaagaaaaggggggattggggggtacagtgcaggggaaagaatagtagacataatagcaacagacatacaaactaaag

SEQ ID NO: 17690 - DNA, 301 bp, Artificial Sequence
  Kmt2c.1_NTC.30
  crRNA array
  misc_feature (148)..(157): n is a, c, g, or t
cttggctttatatatcttgtggaaaggacgaaacaccgtaatttctactaagtgtagatactcgacctccacctccctataatttctactaagtgtagatcgatcgtacgggtgtcctaataatttctactaagtgtagatttttttnnnnnnnnnnaagcttggcgtggatccgatatcaactagatcttgagacaaatggcagtattcatccacaattttaaaagaaaaggggggattggggggtacagtgcaggggaaagaatagtagacataatagcaacagacatacaaactaaag

SEQ ID NO: 17691 - DNA, 301 bp, Artificial Sequence
  Kmt2c.1_NTC.31
  crRNA array
  misc_feature (148)..(157): n is a, c, g, or t
cttggctttatatatcttgtggaaaggacgaaacaccgtaatttctactaagtgtagatactcgacctccacctccctataatttctactaagtgtagatgccgaccgcgtgattgtaggtaatttctactaagtgtagatttttttnnnnnnnnnnaagcttggcgtggatccgatatcaactagatcttgagacaaatggcagtattcatccacaattttaaaagaaaaggggggattggggggtacagtgcaggggaaagaatagtagacataatagcaacagacatacaaactaaag

SEQ ID NO: 17692 - DNA, 301 bp, Artificial Sequence
  Kmt2c.1_NTC.32
  crRNA array
  misc_feature (148)..(157): n is a, c, g, or t
cttggctttatatatcttgtggaaaggacgaaacaccgtaatttctactaagtgtagatactcgacctccacctccctataatttctactaagtgtagatgcacgttacgcccgggtcactaatttctactaagtgtagatttttttnnnnnnnnnnaagcttggcgtggatccgatatcaactagatcttgagacaaatggcagtattcatccacaattttaaaagaaaaggggggattggggggtacagtgcaggggaaagaatagtagacataatagcaacagacatacaaactaaag

SEQ ID NO: 17693 - DNA, 301 bp, Artificial Sequence
  Kmt2c.1_NTC.33
  crRNA array
  misc_feature (148)..(157): n is a, c, g, or t
cttggctttatatatcttgtggaaaggacgaaacaccgtaatttctactaagtgtagatactcgacctccacctccctataatttctactaagtgtagattaagcgaccgacgcattcgctaatttctactaagtgtagatttttttnnnnnnnnnnaagcttggcgtggatccgatatcaactagatcttgagacaaatggcagtattcatccacaattttaaaagaaaaggggggattggggggtacagtgcaggggaaagaatagtagacataatagcaacagacatacaaactaaag

SEQ ID NO: 17694 - DNA, 301 bp, Artificial Sequence
  Kmt2c.1_NTC.34
  crRNA array
  misc_feature (148)..(157): n is a, c, g, or t
cttggctttatatatcttgtggaaaggacgaaacaccgtaatttctactaagtgtagatactcgacctccacctccctataatttctactaagtgtagattagcgttcgacacgtgaaactaatttctactaagtgtagatttttttnnnnnnnnnnaagcttggcgtggatccgatatcaactagatcttgagacaaatggcagtattcatccacaattttaaaagaaaaggggggattggggggtacagtgcaggggaaagaatagtagacataatagcaacagacatacaaactaaag

SEQ ID NO: 17695 - DNA, 301 bp, Artificial Sequence
  Kmt2c.1_NTC.35
  crRNA array
  misc_feature (148)..(157): n is a, c, g, or t
cttggctttatatatcttgtggaaaggacgaaacaccgtaatttctactaagtgtagatactcgacctccacctccctataatttctactaagtgtagattggcgcgtaatcgctattcgtaatttctactaagtgtagatttttttnnnnnnnnnnaagcttggcgtggatccgatatcaactagatcttgagacaaatggcagtattcatccacaattttaaaagaaaaggggggattggggggtacagtgcaggggaaagaatagtagacataatagcaacagacatacaaactaaag

SEQ ID NO: 17696 - DNA, 301 bp, Artificial Sequence
  Kmt2c.1_NTC.36
  crRNA array
  misc_feature (148)..(157): n is a, c, g, or t
cttggctttatatatcttgtggaaaggacgaaacaccgtaatttctactaagtgtagatactcgacctccacctccctataatttctactaagtgtagatcaacccgccgtagcgggccttaatttctactaagtgtagatttttttnnnnnnnnnnaagcttggcgtggatccgatatcaactagatcttgagacaaatggcagtattcatccacaattttaaaagaaaaggggggattggggggtacagtgcaggggaaagaatagtagacataatagcaacagacatacaaactaaag

SEQ ID NO: 17697 - DNA, 301 bp, Artificial Sequence
  Kmt2c.1_NTC.37
  crRNA array
  misc_feature (148)..(157): n is a, c, g, or t
cttggctttatatatcttgtggaaaggacgaaacaccgtaatttctactaagtgtagatactcgacctccacctccctataatttctactaagtgtagattttgcgttgacgcgattacttaatttctactaagtgtagatttttttnnnnnnnnnnaagcttggcgtggatccgatatcaactagatcttgagacaaatggcagtattcatccacaattttaaaagaaaaggggggattggggggtacagtgcaggggaaagaatagtagacataatagcaacagacatacaaactaaag

SEQ ID NO: 17698 - DNA, 301 bp, Artificial Sequence
  Kmt2c.1_NTC.38
  crRNA array
  misc_feature (148)..(157): n is a, c, g, or t
cttggctttatatatcttgtggaaaggacgaaacaccgtaatttctactaagtgtagatactcgacctccacctccctataatttctactaagtgtagataacggagcgcgatactaccataatttctactaagtgtagatttttttnnnnnnnnnnaagcttggcgtggatccgatatcaactagatcttgagacaaatggcagtattcatccacaattttaaaagaaaaggggggattggggggtacagtgcaggggaaagaatagtagacataatagcaacagacatacaaactaaag

SEQ ID NO: 17699 - DNA, 301 bp, Artificial Sequence
  Kmt2c.1_NTC.39
  crRNA array
  misc_feature (148)..(157): n is a, c, g, or t
cttggctttatatatcttgtggaaaggacgaaacaccgtaatttctactaagtgtagatactcgacctccacctccctataatttctactaagtgtagatccggacgttataacgtttcttaatttctactaagtgtagatttttttnnnnnnnnnnaagcttggcgtggatccgatatcaactagatcttgagacaaatggcagtattcatccacaattttaaaagaaaaggggggattggggggtacagtgcaggggaaagaatagtagacataatagcaacagacatacaaactaaag

SEQ ID NO: 17700 - DNA, 301 bp, Artificial Sequence
  Kmt2c.1_NTC.4
  crRNA array
  misc_feature (148)..(157): n is a, c, g, or t
cttggctttatatatcttgtggaaaggacgaaacaccgtaatttctactaagtgtagatactcgacctccacctccctataatttctactaagtgtagatatacccgtcgcgaacgtgagtaatttctactaagtgtagatttttttnnnnnnnnnnaagcttggcgtggatccgatatcaactagatcttgagacaaatggcagtattcatccacaattttaaaagaaaaggggggattggggggtacagtgcaggggaaagaatagtagacataatagcaacagacatacaaactaaag

SEQ ID NO: 17701 - DNA, 301 bp, Artificial Sequence
  Kmt2c.1_NTC.40
  crRNA array
  misc_feature (148)..(157): n is a, c, g, or t
cttggctttatatatcttgtggaaaggacgaaacaccgtaatttctactaagtgtagatactcgacctccacctccctataatttctactaagtgtagatattcgcgaacccggccggaataatttctactaagtgtagatttttttnnnnnnnnnnaagcttggcgtggatccgatatcaactagatcttgagacaaatggcagtattcatccacaattttaaaagaaaaggggggattggggggtacagtgcaggggaaagaatagtagacataatagcaacagacatacaaactaaag

SEQ ID NO: 17702 - DNA, 301 bp, Artificial Sequence
  Kmt2c.1_NTC.41
  crRNA array
  misc_feature (148)..(157): n is a, c, g, or t
cttggctttatatatcttgtggaaaggacgaaacaccgtaatttctactaagtgtagatactcgacctccacctccctataatttctactaagtgtagatttgatggcgcgacgcgttattaatttctactaagtgtagatttttttnnnnnnnnnnaagcttggcgtggatccgatatcaactagatcttgagacaaatggcagtattcatccacaattttaaaagaaaaggggggattggggggtacagtgcaggggaaagaatagtagacataatagcaacagacatacaaactaaag

SEQ ID NO: 17703 - DNA, 301 bp, Artificial Sequence
  Kmt2c.1_NTC.42
  crRNA array
  misc_feature (148)..(157): n is a, c, g, or t
cttggctttatatatcttgtggaaaggacgaaacaccgtaatttctactaagtgtagatactcgacctccacctccctataatttctactaagtgtagatggtcaaatcgcggcgataactaatttctactaagtgtagatttttttnnnnnnnnnnaagcttggcgtggatccgatatcaactagatcttgagacaaatggcagtattcatccacaattttaaaagaaaaggggggattggggggtacagtgcaggggaaagaatagtagacataatagcaacagacatacaaactaaag

SEQ ID NO: 17704 - DNA, 301 bp, Artificial Sequence
  Kmt2c.1_NTC.43
  crRNA array
  misc_feature (148)..(157): n is a, c, g, or t
cttggctttatatatcttgtggaaaggacgaaacaccgtaatttctactaagtgtagatactcgacctccacctccctataatttctactaagtgtagatcgactcgcgcattgaactggtaatttctactaagtgtagatttttttnnnnnnnnnnaagcttggcgtggatccgatatcaactagatcttgagacaaatggcagtattcatccacaattttaaaagaaaaggggggattggggggtacagtgcaggggaaagaatagtagacataatagcaacagacatacaaactaaag

SEQ ID NO: 17705 - DNA, 301 bp, Artificial Sequence
  Kmt2c.1_NTC.44
  crRNA array
  misc_feature (148)..(157): n is a, c, g, or t
cttggctttatatatcttgtggaaaggacgaaacaccgtaatttctactaagtgtagatactcgacctccacctccctataatttctactaagtgtagatagcgtcgtacgatttatcgttaatttctactaagtgtagatttttttnnnnnnnnnnaagcttggcgtggatccgatatcaactagatcttgagacaaatggcagtattcatccacaattttaaaagaaaaggggggattggggggtacagtgcaggggaaagaatagtagacataatagcaacagacatacaaactaaag

SEQ ID NO: 17706 - DNA, 301 bp, Artificial Sequence
  Kmt2c.1_NTC.45
  crRNA array
  misc_feature (148)..(157): n is a, c, g, or t
cttggctttatatatcttgtggaaaggacgaaacaccgtaatttctactaagtgtagatactcgacctccacctccctataatttctactaagtgtagatcggaacgcgtgatactagggtaatttctactaagtgtagatttttttnnnnnnnnnnaagcttggcgtggatccgatatcaactagatcttgagacaaatggcagtattcatccacaattttaaaagaaaaggggggattggggggtacagtgcaggggaaagaatagtagacataatagcaacagacatacaaactaaag

SEQ ID NO: 17707 - DNA, 301 bp, Artificial Sequence
  Kmt2c.1_NTC.46
  crRNA array
  misc_feature (148)..(157): n is a, c, g, or t
cttggctttatatatcttgtggaaaggacgaaacaccgtaatttctactaagtgtagatactcgacctccacctccctataatttctactaagtgtagatagcgggtcgtagacgcgcggtaatttctactaagtgtagatttttttnnnnnnnnnnaagcttggcgtggatccgatatcaactagatcttgagacaaatggcagtattcatccacaattttaaaagaaaaggggggattggggggtacagtgcaggggaaagaatagtagacataatagcaacagacatacaaactaaag

SEQ ID NO: 17708 - DNA, 301 bp, Artificial Sequence
  Kmt2c.1_NTC.47
  crRNA array
  misc_feature (148)..(157): n is a, c, g, or t
cttggctttatatatcttgtggaaaggacgaaacaccgtaatttctactaagtgtagatactcgacctccacctccctataatttctactaagtgtagattctcgtatcgcgattgttaataatttctactaagtgtagatttttttnnnnnnnnnnaagcttggcgtggatccgatatcaactagatcttgagacaaatggcagtattcatccacaattttaaaagaaaaggggggattggggggtacagtgcaggggaaagaatagtagacataatagcaacagacatacaaactaaag

SEQ ID NO: 17709 - DNA, 301 bp, Artificial Sequence
  Kmt2c.1_NTC.48
  crRNA array
  misc_feature (148)..(157): n is a, c, g, or t
cttggctttatatatcttgtggaaaggacgaaacaccgtaatttctactaagtgtagatactcgacctccacctccctataatttctactaagtgtagatcggtcgactacggctgttagtaatttctactaagtgtagatttttttnnnnnnnnnnaagcttggcgtggatccgatatcaactagatcttgagacaaatggcagtattcatccacaattttaaaagaaaaggggggattggggggtacagtgcaggggaaagaatagtagacataatagcaacagacatacaaactaaag

SEQ ID NO: 17710 - DNA, 301 bp, Artificial Sequence
  Kmt2c.1_NTC.49
  crRNA array
  misc_feature (148)..(157): n is a, c, g, or t
cttggctttatatatcttgtggaaaggacgaaacaccgtaatttctactaagtgtagatactcgacctccacctccctataatttctactaagtgtagattcggggcgcgtcaactgaattaatttctactaagtgtagatttttttnnnnnnnnnnaagcttggcgtggatccgatatcaactagatcttgagacaaatggcagtattcatccacaattttaaaagaaaaggggggattggggggtacagtgcaggggaaagaatagtagacataatagcaacagacatacaaactaaag

SEQ ID NO: 17711 - DNA, 301 bp, Artificial Sequence
  Kmt2c.1_NTC.5
  crRNA array
  misc_feature (148)..(157): n is a, c, g, or t
cttggctttatatatcttgtggaaaggacgaaacaccgtaatttctactaagtgtagatactcgacctccacctccctataatttctactaagtgtagatgcttacgcgtcgcgaatgtataatttctactaagtgtagatttttttnnnnnnnnnnaagcttggcgtggatccgatatcaactagatcttgagacaaatggcagtattcatccacaattttaaaagaaaaggggggattggggggtacagtgcaggggaaagaatagtagacataatagcaacagacatacaaactaaag

SEQ ID NO: 17712 - DNA, 301 bp, Artificial Sequence
  Kmt2c.1_NTC.50
  crRNA array
  misc_feature (148)..(157): n is a, c, g, or t
cttggctttatatatcttgtggaaaggacgaaacaccgtaatttctactaagtgtagatactcgacctccacctccctataatttctactaagtgtagatattgccgctcgcgcaaaatctaatttctactaagtgtagatttttttnnnnnnnnnnaagcttggcgtggatccgatatcaactagatcttgagacaaatggcagtattcatccacaattttaaaagaaaaggggggattggggggtacagtgcaggggaaagaatagtagacataatagcaacagacatacaaactaaag

SEQ ID NO: 17713 - DNA, 301 bp, Artificial Sequence
  Kmt2c.1_NTC.51
  crRNA array
  misc_feature (148)..(157): n is a, c, g, or t
cttggctttatatatcttgtggaaaggacgaaacaccgtaatttctactaagtgtagatactcgacctccacctccctataatttctactaagtgtagattaacgcgcaacacgccaatgtaatttctactaagtgtagatttttttnnnnnnnnnnaagcttggcgtggatccgatatcaactagatcttgagacaaatggcagtattcatccacaattttaaaagaaaaggggggattggggggtacagtgcaggggaaagaatagtagacataatagcaacagacatacaaactaaag

SEQ ID NO: 17714 - DNA, 301 bp, Artificial Sequence
  Kmt2c.1_NTC.6
  crRNA array
  misc_feature (148)..(157): n is a, c, g, or t
cttggctttatatatcttgtggaaaggacgaaacaccgtaatttctactaagtgtagatactcgacctccacctccctataatttctactaagtgtagatcgaatcgcgcctacgggaattaatttctactaagtgtagatttttttnnnnnnnnnnaagcttggcgtggatccgatatcaactagatcttgagacaaatggcagtattcatccacaattttaaaagaaaaggggggattggggggtacagtgcaggggaaagaatagtagacataatagcaacagacatacaaactaaag

SEQ ID NO: 17715 - DNA, 301 bp, Artificial Sequence
  Kmt2c.1_NTC.7
  crRNA array
  misc_feature (148)..(157): n is a, c, g, or t
cttggctttatatatcttgtggaaaggacgaaacaccgtaatttctactaagtgtagatactcgacctccacctccctataatttctactaagtgtagatcgccgaacggataagactattaatttctactaagtgtagatttttttnnnnnnnnnnaagcttggcgtggatccgatatcaactagatcttgagacaaatggcagtattcatccacaattttaaaagaaaaggggggattggggggtacagtgcaggggaaagaatagtagacataatagcaacagacatacaaactaaag

SEQ ID NO: 17716 - DNA, 301 bp, Artificial Sequence
  Kmt2c.1_NTC.8
  crRNA array
  misc_feature (148)..(157): n is a, c, g, or t
cttggctttatatatcttgtggaaaggacgaaacaccgtaatttctactaagtgtagatactcgacctccacctccctataatttctactaagtgtagatcgaccgaggttacgctgggataatttctactaagtgtagatttttttnnnnnnnnnnaagcttggcgtggatccgatatcaactagatcttgagacaaatggcagtattcatccacaattttaaaagaaaaggggggattggggggtacagtgcaggggaaagaatagtagacataatagcaacagacatacaaactaaag

SEQ ID NO: 17717 - DNA, 301 bp, Artificial Sequence
  Kmt2c.1_NTC.9
  crRNA array
  misc_feature (148)..(157): n is a, c, g, or t
cttggctttatatatcttgtggaaaggacgaaacaccgtaatttctactaagtgtagatactcgacctccacctccctataatttctactaagtgtagatatcgccgtacggctatggcataatttctactaagtgtagatttttttnnnnnnnnnnaagcttggcgtggatccgatatcaactagatcttgagacaaatggcagtattcatccacaattttaaaagaaaaggggggattggggggtacagtgcaggggaaagaatagtagacataatagcaacagacatacaaactaaag

SEQ ID NO: 17718 - DNA, 301 bp, Artificial Sequence
  Kmt2c.2_NTC.0
  crRNA array
  misc_feature (148)..(157): n is a, c, g, or t
cttggctttatatatcttgtggaaaggacgaaacaccgtaatttctactaagtgtagatcccaaagatcagcgtggacctaatttctactaagtgtagattatagcgtcgcgcgctaatttaatttctactaagtgtagatttttttnnnnnnnnnnaagcttggcgtggatccgatatcaactagatcttgagacaaatggcagtattcatccacaattttaaaagaaaaggggggattggggggtacagtgcaggggaaagaatagtagacataatagcaacagacatacaaactaaag

SEQ ID NO: 17719 - DNA, 301 bp, Artificial Sequence
  Kmt2c.2_NTC.1
  crRNA array
  misc_feature (148)..(157): n is a, c, g, or t
cttggctttatatatcttgtggaaaggacgaaacaccgtaatttctactaagtgtagatcccaaagatcagcgtggacctaatttctactaagtgtagatcgcgtaaccgttccggctcctaatttctactaagtgtagatttttttnnnnnnnnnnaagcttggcgtggatccgatatcaactagatcttgagacaaatggcagtattcatccacaattttaaaagaaaaggggggattggggggtacagtgcaggggaaagaatagtagacataatagcaacagacatacaaactaaag

SEQ ID NO: 17720 - DNA, 301 bp, Artificial Sequence
  Kmt2c.2_NTC.10
  crRNA array
  misc_feature (148)..(157): n is a, c, g, or t
cttggctttatatatcttgtggaaaggacgaaacaccgtaatttctactaagtgtagatcccaaagatcagcgtggacctaatttctactaagtgtagatcgctaagttcgcgcgggccgtaatttctactaagtgtagatttttttnnnnnnnnnnaagcttggcgtggatccgatatcaactagatcttgagacaaatggcagtattcatccacaattttaaaagaaaaggggggattggggggtacagtgcaggggaaagaatagtagacataatagcaacagacatacaaactaaag

SEQ ID NO: 17721 - DNA, 301 bp, Artificial Sequence
  Kmt2c.2_NTC.11
  crRNA array
  misc_feature (148)..(157): n is a, c, g, or t
cttggctttatatatcttgtggaaaggacgaaacaccgtaatttctactaagtgtagatcccaaagatcagcgtggacctaatttctactaagtgtagatcgttcgtcgacgaagcaatctaatttctactaagtgtagatttttttnnnnnnnnnnaagcttggcgtggatccgatatcaactagatcttgagacaaatggcagtattcatccacaattttaaaagaaaaggggggattggggggtacagtgcaggggaaagaatagtagacataatagcaacagacatacaaactaaag

SEQ ID NO: 17722 - DNA, 301 bp, Artificial Sequence
  Kmt2c.2_NTC.12
  crRNA array
  misc_feature (148)..(157): n is a, c, g, or t
cttggctttatatatcttgtggaaaggacgaaacaccgtaatttctactaagtgtagatcccaaagatcagcgtggacctaatttctactaagtgtagatcgccgacgattaatcaatagtaatttctactaagtgtagatttttttnnnnnnnnnnaagcttggcgtggatccgatatcaactagatcttgagacaaatggcagtattcatccacaattttaaaagaaaaggggggattggggggtacagtgcaggggaaagaatagtagacataatagcaacagacatacaaactaaag

SEQ ID NO: 17723 - DNA, 301 bp, Artificial Sequence
  Kmt2c.2_NTC.13
  crRNA array
  misc_feature (148)..(157): n is a, c, g, or t
cttggctttatatatcttgtggaaaggacgaaacaccgtaatttctactaagtgtagatcccaaagatcagcgtggacctaatttctactaagtgtagatgaccgttgtatcgcgatcaataatttctactaagtgtagatttttttnnnnnnnnnnaagcttggcgtggatccgatatcaactagatcttgagacaaatggcagtattcatccacaattttaaaagaaaaggggggattggggggtacagtgcaggggaaagaatagtagacataatagcaacagacatacaaactaaag

SEQ ID NO: 17724 - DNA, 301 bp, Artificial Sequence
  Kmt2c.2_NTC.14
  crRNA array
  misc_feature (148)..(157): n is a, c, g, or t
cttggctttatatatcttgtggaaaggacgaaacaccgtaatttctactaagtgtagatcccaaagatcagcgtggacctaatttctactaagtgtagatccgttcgtgcgatagtgttttaatttctactaagtgtagatttttttnnnnnnnnnnaagcttggcgtggatccgatatcaactagatcttgagacaaatggcagtattcatccacaattttaaaagaaaaggggggattggggggtacagtgcaggggaaagaatagtagacataatagcaacagacatacaaactaaag

SEQ ID NO: 17725 - DNA, 301 bp, Artificial Sequence
  Kmt2c.2_NTC.15
  crRNA array
  misc_feature (148)..(157): n is a, c, g, or t
cttggctttatatatcttgtggaaaggacgaaacaccgtaatttctactaagtgtagatcccaaagatcagcgtggacctaatttctactaagtgtagatgttgtcgtgccgcgaatttataatttctactaagtgtagatttttttnnnnnnnnnnaagcttggcgtggatccgatatcaactagatcttgagacaaatggcagtattcatccacaattttaaaagaaaaggggggattggggggtacagtgcaggggaaagaatagtagacataatagcaacagacatacaaactaaag

SEQ ID NO: 17726 - DNA, 301 bp, Artificial Sequence
  Kmt2c.2_NTC.16
  crRNA array
  misc_feature (148)..(157): n is a, c, g, or t
cttggctttatatatcttgtggaaaggacgaaacaccgtaatttctactaagtgtagatcccaaagatcagcgtggacctaatttctactaagtgtagatcggtacgttagacgaaaatttaatttctactaagtgtagatttttttnnnnnnnnnnaagcttggcgtggatccgatatcaactagatcttgagacaaatggcagtattcatccacaattttaaaagaaaaggggggattggggggtacagtgcaggggaaagaatagtagacataatagcaacagacatacaaactaaag

SEQ ID NO: 17727 - DNA, 301 bp, Artificial Sequence
  Kmt2c.2_NTC.17
  crRNA array
  misc_feature (148)..(157): n is a, c, g, or t
cttggctttatatatcttgtggaaaggacgaaacaccgtaatttctactaagtgtagatcccaaagatcagcgtggacctaatttctactaagtgtagattatcgaacgctatcgaacgttaatttctactaagtgtagatttttttnnnnnnnnnnaagcttggcgtggatccgatatcaactagatcttgagacaaatggcagtattcatccacaattttaaaagaaaaggggggattggggggtacagtgcaggggaaagaatagtagacataatagcaacagacatacaaactaaag

SEQ ID NO: 17728 - DNA, 301 bp, Artificial Sequence
  Kmt2c.2_NTC.18
  crRNA array
  misc_feature (148)..(157): n is a, c, g, or t
cttggctttatatatcttgtggaaaggacgaaacaccgtaatttctactaagtgtagatcccaaagatcagcgtggacctaatttctactaagtgtagattccggttacgaccggcaaaataatttctactaagtgtagatttttttnnnnnnnnnnaagcttggcgtggatccgatatcaactagatcttgagacaaatggcagtattcatccacaattttaaaagaaaaggggggattggggggtacagtgcaggggaaagaatagtagacataatagcaacagacatacaaactaaag

SEQ ID NO: 17729 - DNA, 301 bp, Artificial Sequence
  Kmt2c.2_NTC.19
  crRNA array
  misc_feature (148)..(157): n is a, c, g, or t
cttggctttatatatcttgtggaaaggacgaaacaccgtaatttctactaagtgtagatcccaaagatcagcgtggacctaatttctactaagtgtagatcgtcgtagaacgatacccgataatttctactaagtgtagatttttttnnnnnnnnnnaagcttggcgtggatccgatatcaactagatcttgagacaaatggcagtattcatccacaattttaaaagaaaaggggggattggggggtacagtgcaggggaaagaatagtagacataatagcaacagacatacaaactaaag

SEQ ID NO: 17730 - DNA, 301 bp, Artificial Sequence
  Kmt2c.2_NTC.2
  crRNA array
  misc_feature (148)..(157): n is a, c, g, or t
cttggctttatatatcttgtggaaaggacgaaacaccgtaatttctactaagtgtagatcccaaagatcagcgtggacctaatttctactaagtgtagatttatgtcgcgccgcgacccgtaatttctactaagtgtagatttttttnnnnnnnnnnaagcttggcgtggatccgatatcaactagatcttgagacaaatggcagtattcatccacaattttaaaagaaaaggggggattggggggtacagtgcaggggaaagaatagtagacataatagcaacagacatacaaactaaag

SEQ ID NO: 17731 - DNA, 301 bp, Artificial Sequence
  Kmt2c.2_NTC.20
  crRNA array
  misc_feature (148)..(157): n is a, c, g, or t
cttggctttatatatcttgtggaaaggacgaaacaccgtaatttctactaagtgtagatcccaaagatcagcgtggacctaatttctactaagtgtagatattccggcgcgaccagaagataatttctactaagtgtagatttttttnnnnnnnnnnaagcttggcgtggatccgatatcaactagatcttgagacaaatggcagtattcatccacaattttaaaagaaaaggggggattggggggtacagtgcaggggaaagaatagtagacataatagcaacagacatacaaactaaag

SEQ ID NO: 17732 - DNA, 301 bp, Artificial Sequence
  Kmt2c.2_NTC.21
  crRNA array
  misc_feature (148)..(157): n is a, c, g, or t
cttggctttatatatcttgtggaaaggacgaaacaccgtaatttctactaagtgtagatcccaaagatcagcgtggacctaatttctactaagtgtagatgtataacttcgcgcggtccgtaatttctactaagtgtagatttttttnnnnnnnnnnaagcttggcgtggatccgatatcaactagatcttgagacaaatggcagtattcatccacaattttaaaagaaaaggggggattggggggtacagtgcaggggaaagaatagtagacataatagcaacagacatacaaactaaag

SEQ ID NO: 17733 - DNA, 301 bp, Artificial Sequence
  Kmt2c.2_NTC.22
  crRNA array
  misc_feature (148)..(157): n is a, c, g, or t
cttggctttatatatcttgtggaaaggacgaaacaccgtaatttctactaagtgtagatcccaaagatcagcgtggacctaatttctactaagtgtagatgcgcgtcaacgtaatgtgcctaatttctactaagtgtagatttttttnnnnnnnnnnaagcttggcgtggatccgatatcaactagatcttgagacaaatggcagtattcatccacaattttaaaagaaaaggggggattggggggtacagtgcaggggaaagaatagtagacataatagcaacagacatacaaactaaag

SEQ ID NO: 17734 - DNA, 301 bp, Artificial Sequence
  Kmt2c.2_NTC.23
  crRNA array
  misc_feature (148)..(157): n is a, c, g, or t
cttggctttatatatcttgtggaaaggacgaaacaccgtaatttctactaagtgtagatcccaaagatcagcgtggacctaatttctactaagtgtagatacgcgctattatcgtaggtgtaatttctactaagtgtagatttttttnnnnnnnnnnaagcttggcgtggatccgatatcaactagatcttgagacaaatggcagtattcatccacaattttaaaagaaaaggggggattggggggtacagtgcaggggaaagaatagtagacataatagcaacagacatacaaactaaag

SEQ ID NO: 17735 - DNA, 301 bp, Artificial Sequence
  Kmt2c.2_NTC.24
  crRNA array
  misc_feature (148)..(157): n is a, c, g, or t
cttggctttatatatcttgtggaaaggacgaaacaccgtaatttctactaagtgtagatcccaaagatcagcgtggacctaatttctactaagtgtagatactatcgacgttcgtcccggtaatttctactaagtgtagatttttttnnnnnnnnnnaagcttggcgtggatccgatatcaactagatcttgagacaaatggcagtattcatccacaattttaaaagaaaaggggggattggggggtacagtgcaggggaaagaatagtagacataatagcaacagacatacaaactaaag

SEQ ID NO: 17736 - DNA, 301 bp, Artificial Sequence
  Kmt2c.2_NTC.25
  crRNA array
  misc_feature (148)..(157): n is a, c, g, or t
cttggctttatatatcttgtggaaaggacgaaacaccgtaatttctactaagtgtagatcccaaagatcagcgtggacctaatttctactaagtgtagattcgcgttatcgtgccgtgcgtaatttctactaagtgtagatttttttnnnnnnnnnnaagcttggcgtggatccgatatcaactagatcttgagacaaatggcagtattcatccacaattttaaaagaaaaggggggattggggggtacagtgcaggggaaagaatagtagacataatagcaacagacatacaaactaaag

SEQ ID NO: 17737 - DNA, 301 bp, Artificial Sequence
  Kmt2c.2_NTC.26
  crRNA array
  misc_feature (148)..(157): n is a, c, g, or t
cttggctttatatatcttgtggaaaggacgaaacaccgtaatttctactaagtgtagatcccaaagatcagcgtggacctaatttctactaagtgtagatcgcgacggcggttttaacactaatttctactaagtgtagatttttttnnnnnnnnnnaagcttggcgtggatccgatatcaactagatcttgagacaaatggcagtattcatccacaattttaaaagaaaaggggggattggggggtacagtgcaggggaaagaatagtagacataatagcaacagacatacaaactaaag

SEQ ID NO: 17738 - DNA, 301 bp, Artificial Sequence
  Kmt2c.2_NTC.27
  crRNA array
  misc_feature (148)..(157): n is a, c, g, or t
cttggctttatatatcttgtggaaaggacgaaacaccgtaatttctactaagtgtagatcccaaagatcagcgtggacctaatttctactaagtgtagatgtcgcgttgcgaccggcgcttaatttctactaagtgtagatttttttnnnnnnnnnnaagcttggcgtggatccgatatcaactagatcttgagacaaatggcagtattcatccacaattttaaaagaaaaggggggattggggggtacagtgcaggggaaagaatagtagacataatagcaacagacatacaaactaaag

SEQ ID NO: 17739 - DNA, 301 bp, Artificial Sequence
  Kmt2c.2_NTC.28
  crRNA array
  misc_feature (148)..(157): n is a, c, g, or t
cttggctttatatatcttgtggaaaggacgaaacaccgtaatttctactaagtgtagatcccaaagatcagcgtggacctaatttctactaagtgtagataccgctaatcggcgtaaacttaatttctactaagtgtagatttttttnnnnnnnnnnaagcttggcgtggatccgatatcaactagatcttgagacaaatggcagtattcatccacaattttaaaagaaaaggggggattggggggtacagtgcaggggaaagaatagtagacataatagcaacagacatacaaactaaag

SEQ ID NO: 17740 - DNA, 301 bp, Artificial Sequence
  Kmt2c.2_NTC.29
  crRNA array
  misc_feature (148)..(157): n is a, c, g, or t
cttggctttatatatcttgtggaaaggacgaaacaccgtaatttctactaagtgtagatcccaaagatcagcgtggacctaatttctactaagtgtagatcgcgatctataccgtctatataatttctactaagtgtagatttttttnnnnnnnnnnaagcttggcgtggatccgatatcaactagatcttgagacaaatggcagtattcatccacaattttaaaagaaaaggggggattggggggtacagtgcaggggaaagaatagtagacataatagcaacagacatacaaactaaag

SEQ ID NO: 17741 - DNA, 301 bp, Artificial Sequence
  Kmt2c.2_NTC.3
  crRNA array
  misc_feature (148)..(157): n is a, c, g, or t
cttggctttatatatcttgtggaaaggacgaaacaccgtaatttctactaagtgtagatcccaaagatcagcgtggacctaatttctactaagtgtagattcgacgcgagacgacgtacataatttctactaagtgtagatttttttnnnnnnnnnnaagcttggcgtggatccgatatcaactagatcttgagacaaatggcagtattcatccacaattttaaaagaaaaggggggattggggggtacagtgcaggggaaagaatagtagacataatagcaacagacatacaaactaaag

SEQ ID NO: 17742 - DNA, 301 bp, Artificial Sequence
  Kmt2c.2_NTC.30
  crRNA array
  misc_feature (148)..(157): n is a, c, g, or t
cttggctttatatatcttgtggaaaggacgaaacaccgtaatttctactaagtgtagatcccaaagatcagcgtggacctaatttctactaagtgtagatcgatcgtacgggtgtcctaataatttctactaagtgtagatttttttnnnnnnnnnnaagcttggcgtggatccgatatcaactagatcttgagacaaatggcagtattcatccacaattttaaaagaaaaggggggattggggggtacagtgcaggggaaagaatagtagacataatagcaacagacatacaaactaaag

SEQ ID NO: 17743 - DNA, 301 bp, Artificial Sequence
  Kmt2c.2_NTC.31
  crRNA array
  misc_feature (148)..(157): n is a, c, g, or t
cttggctttatatatcttgtggaaaggacgaaacaccgtaatttctactaagtgtagatcccaaagatcagcgtggacctaatttctactaagtgtagatgccgaccgcgtgattgtaggtaatttctactaagtgtagatttttttnnnnnnnnnnaagcttggcgtggatccgatatcaactagatcttgagacaaatggcagtattcatccacaattttaaaagaaaaggggggattggggggtacagtgcaggggaaagaatagtagacataatagcaacagacatacaaactaaag

SEQ ID NO: 17744 - DNA, 301 bp, Artificial Sequence
  Kmt2c.2_NTC.32
  crRNA array
  misc_feature (148)..(157): n is a, c, g, or t
cttggctttatatatcttgtggaaaggacgaaacaccgtaatttctactaagtgtagatcccaaagatcagcgtggacctaatttctactaagtgtagatgcacgttacgcccgggtcactaatttctactaagtgtagatttttttnnnnnnnnnnaagcttggcgtggatccgatatcaactagatcttgagacaaatggcagtattcatccacaattttaaaagaaaaggggggattggggggtacagtgcaggggaaagaatagtagacataatagcaacagacatacaaactaaag

SEQ ID NO: 17745 - DNA, 301 bp, Artificial Sequence
  Kmt2c.2_NTC.33
  crRNA array
  misc_feature (148)..(157): n is a, c, g, or t
cttggctttatatatcttgtggaaaggacgaaacaccgtaatttctactaagtgtagatcccaaagatcagcgtggacctaatttctactaagtgtagattaagcgaccgacgcattcgctaatttctactaagtgtagatttttttnnnnnnnnnnaagcttggcgtggatccgatatcaactagatcttgagacaaatggcagtattcatccacaattttaaaagaaaaggggggattggggggtacagtgcaggggaaagaatagtagacataatagcaacagacatacaaactaaag

SEQ ID NO: 17746 - DNA, 301 bp, Artificial Sequence
  Kmt2c.2_NTC.34
  crRNA array
  misc_feature (148)..(157): n is a, c, g, or t
cttggctttatatatcttgtggaaaggacgaaacaccgtaatttctactaagtgtagatcccaaagatcagcgtggacctaatttctactaagtgtagattagcgttcgacacgtgaaactaatttctactaagtgtagatttttttnnnnnnnnnnaagcttggcgtggatccgatatcaactagatcttgagacaaatggcagtattcatccacaattttaaaagaaaaggggggattggggggtacagtgcaggggaaagaatagtagacataatagcaacagacatacaaactaaag

SEQ ID NO: 17747 - DNA, 301 bp, Artificial Sequence
  Kmt2c.2_NTC.35
  crRNA array
  misc_feature (148)..(157): n is a, c, g, or t
cttggctttatatatcttgtggaaaggacgaaacaccgtaatttctactaagtgtagatcccaaagatcagcgtggacctaatttctactaagtgtagattggcgcgtaatcgctattcgtaatttctactaagtgtagatttttttnnnnnnnnnnaagcttggcgtggatccgatatcaactagatcttgagacaaatggcagtattcatccacaattttaaaagaaaaggggggattggggggtacagtgcaggggaaagaatagtagacataatagcaacagacatacaaactaaag

SEQ ID NO: 17748 - DNA, 301 bp, Artificial Sequence
  Kmt2c.2_NTC.36
  crRNA array
  misc_feature (148)..(157): n is a, c, g, or t
cttggctttatatatcttgtggaaaggacgaaacaccgtaatttctactaagtgtagatcccaaagatcagcgtggacctaatttctactaagtgtagatcaacccgccgtagcgggccttaatttctactaagtgtagatttttttnnnnnnnnnnaagcttggcgtggatccgatatcaactagatcttgagacaaatggcagtattcatccacaattttaaaagaaaaggggggattggggggtacagtgcaggggaaagaatagtagacataatagcaacagacatacaaactaaag

SEQ ID NO: 17749 - DNA, 301 bp, Artificial Sequence
  Kmt2c.2_NTC.37
  crRNA array
  misc_feature (148)..(157): n is a, c, g, or t
cttggctttatatatcttgtggaaaggacgaaacaccgtaatttctactaagtgtagatcccaaagatcagcgtggacctaatttctactaagtgtagattttgcgttgacgcgattacttaatttctactaagtgtagatttttttnnnnnnnnnnaagcttggcgtggatccgatatcaactagatcttgagacaaatggcagtattcatccacaattttaaaagaaaaggggggattggggggtacagtgcaggggaaagaatagtagacataatagcaacagacatacaaactaaag

SEQ ID NO: 17750 - DNA, 301 bp, Artificial Sequence
  Kmt2c.2_NTC.38
  crRNA array
  misc_feature (148)..(157): n is a, c, g, or t
cttggctttatatatcttgtggaaaggacgaaacaccgtaatttctactaagtgtagatcccaaagatcagcgtggacctaatttctactaagtgtagataacggagcgcgatactaccataatttctactaagtgtagatttttttnnnnnnnnnnaagcttggcgtggatccgatatcaactagatcttgagacaaatggcagtattcatccacaattttaaaagaaaaggggggattggggggtacagtgcaggggaaagaatagtagacataatagcaacagacatacaaactaaag

SEQ ID NO: 17751 - DNA, 301 bp, Artificial Sequence
  Kmt2c.2_NTC.39
  crRNA array
  misc_feature (148)..(157): n is a, c, g, or t
cttggctttatatatcttgtggaaaggacgaaacaccgtaatttctactaagtgtagatcccaaagatcagcgtggacctaatttctactaagtgtagatccggacgttataacgtttcttaatttctactaagtgtagatttttttnnnnnnnnnnaagcttggcgtggatccgatatcaactagatcttgagacaaatggcagtattcatccacaattttaaaagaaaaggggggattggggggtacagtgcaggggaaagaatagtagacataatagcaacagacatacaaactaaag

SEQ ID NO: 17752 - DNA, 301 bp, Artificial Sequence
  Kmt2c.2_NTC.4
  crRNA array
  misc_feature (148)..(157): n is a, c, g, or t
cttggctttatatatcttgtggaaaggacgaaacaccgtaatttctactaagtgtagatcccaaagatcagcgtggacctaatttctactaagtgtagatatacccgtcgcgaacgtgagtaatttctactaagtgtagatttttttnnnnnnnnnnaagcttggcgtggatccgatatcaactagatcttgagacaaatggcagtattcatccacaattttaaaagaaaaggggggattggggggtacagtgcaggggaaagaatagtagacataatagcaacagacatacaaactaaag

SEQ ID NO: 17753 - DNA, 301 bp, Artificial Sequence
  Kmt2c.2_NTC.40
  crRNA array
  misc_feature (148)..(157): n is a, c, g, or t
cttggctttatatatcttgtggaaaggacgaaacaccgtaatttctactaagtgtagatcccaaagatcagcgtggacctaatttctactaagtgtagatattcgcgaacccggccggaataatttctactaagtgtagatttttttnnnnnnnnnnaagcttggcgtggatccgatatcaactagatcttgagacaaatggcagtattcatccacaattttaaaagaaaaggggggattggggggtacagtgcaggggaaagaatagtagacataatagcaacagacatacaaactaaag

SEQ ID NO: 17754 - DNA, 301 bp, Artificial Sequence
  Kmt2c.2_NTC.41
  crRNA array
  misc_feature (148)..(157): n is a, c, g, or t
cttggctttatatatcttgtggaaaggacgaaacaccgtaatttctactaagtgtagatcccaaagatcagcgtggacctaatttctactaagtgtagatttgatggcgcgacgcgttattaatttctactaagtgtagatttttttnnnnnnnnnnaagcttggcgtggatccgatatcaactagatcttgagacaaatggcagtattcatccacaattttaaaagaaaaggggggattggggggtacagtgcaggggaaagaatagtagacataatagcaacagacatacaaactaaag

SEQ ID NO: 17755 - DNA, 301 bp, Artificial Sequence
  Kmt2c.2_NTC.42
  crRNA array
  misc_feature (148)..(157): n is a, c, g, or t
cttggctttatatatcttgtggaaaggacgaaacaccgtaatttctactaagtgtagatcccaaagatcagcgtggacctaatttctactaagtgtagatggtcaaatcgcggcgataactaatttctactaagtgtagatttttttnnnnnnnnnnaagcttggcgtggatccgatatcaactagatcttgagacaaatggcagtattcatccacaattttaaaagaaaaggggggattggggggtacagtgcaggggaaagaatagtagacataatagcaacagacatacaaactaaag

SEQ ID NO: 17756 - DNA, 301 bp, Artificial Sequence
  Kmt2c.2_NTC.43
  crRNA array
  misc_feature (148)..(157): n is a, c, g, or t
cttggctttatatatcttgtggaaaggacgaaacaccgtaatttctactaagtgtagatcccaaagatcagcgtggacctaatttctactaagtgtagatcgactcgcgcattgaactggtaatttctactaagtgtagatttttttnnnnnnnnnnaagcttggcgtggatccgatatcaactagatcttgagacaaatggcagtattcatccacaattttaaaagaaaaggggggattggggggtacagtgcaggggaaagaatagtagacataatagcaacagacatacaaactaaag

SEQ ID NO: 17757 - DNA, 301 bp, Artificial Sequence
  Kmt2c.2_NTC.44
  crRNA array
  misc_feature (148)..(157): n is a, c, g, or t
cttggctttatatatcttgtggaaaggacgaaacaccgtaatttctactaagtgtagatcccaaagatcagcgtggacctaatttctactaagtgtagatagcgtcgtacgatttatcgttaatttctactaagtgtagatttttttnnnnnnnnnnaagcttggcgtggatccgatatcaactagatcttgagacaaatggcagtattcatccacaattttaaaagaaaaggggggattggggggtacagtgcaggggaaagaatagtagacataatagcaacagacatacaaactaaag

SEQ ID NO: 17758 - DNA, 301 bp, Artificial Sequence
  Kmt2c.2_NTC.45
  crRNA array
  misc_feature (148)..(157): n is a, c, g, or t
cttggctttatatatcttgtggaaaggacgaaacaccgtaatttctactaagtgtagatcccaaagatcagcgtggacctaatttctactaagtgtagatcggaacgcgtgatactagggtaatttctactaagtgtagatttttttnnnnnnnnnnaagcttggcgtggatccgatatcaactagatcttgagacaaatggcagtattcatccacaattttaaaagaaaaggggggattggggggtacagtgcaggggaaagaatagtagacataatagcaacagacatacaaactaaag

SEQ ID NO: 17759 - DNA, 301 bp, Artificial Sequence
  Kmt2c.2_NTC.46
  crRNA array
  misc_feature (148)..(157): n is a, c, g, or t
cttggctttatatatcttgtggaaaggacgaaacaccgtaatttctactaagtgtagatcccaaagatcagcgtggacctaatttctactaagtgtagatagcgggtcgtagacgcgcggtaatttctactaagtgtagatttttttnnnnnnnnnnaagcttggcgtggatccgatatcaactagatcttgagacaaatggcagtattcatccacaattttaaaagaaaaggggggattggggggtacagtgcaggggaaagaatagtagacataatagcaacagacatacaaactaaag

SEQ ID NO: 17760 - DNA, 301 bp, Artificial Sequence
  Kmt2c.2_NTC.47
  crRNA array
  misc_feature (148)..(157): n is a, c, g, or t
cttggctttatatatcttgtggaaaggacgaaacaccgtaatttctactaagtgtagatcccaaagatcagcgtggacctaatttctactaagtgtagattctcgtatcgcgattgttaataatttctactaagtgtagatttttttnnnnnnnnnnaagcttggcgtggatccgatatcaactagatcttgagacaaatggcagtattcatccacaattttaaaagaaaaggggggattggggggtacagtgcaggggaaagaatagtagacataatagcaacagacatacaaactaaag

SEQ ID NO: 17761 - DNA, 301 bp, Artificial Sequence
  Kmt2c.2_NTC.48
  crRNA array
  misc_feature (148)..(157): n is a, c, g, or t
cttggctttatatatcttgtggaaaggacgaaacaccgtaatttctactaagtgtagatcccaaagatcagcgtggacctaatttctactaagtgtagatcggtcgactacggctgttagtaatttctactaagtgtagatttttttnnnnnnnnnnaagcttggcgtggatccgatatcaactagatcttgagacaaatggcagtattcatccacaattttaaaagaaaaggggggattggggggtacagtgcaggggaaagaatagtagacataatagcaacagacatacaaactaaag

SEQ ID NO: 17762 - DNA, 301 bp, Artificial Sequence
  Kmt2c.2_NTC.49
  crRNA array
  misc_feature (148)..(157): n is a, c, g, or t
cttggctttatatatcttgtggaaaggacgaaacaccgtaatttctactaagtgtagatcccaaagatcagcgtggacctaatttctactaagtgtagattcggggcgcgtcaactgaattaatttctactaagtgtagatttttttnnnnnnnnnnaagcttggcgtggatccgatatcaactagatcttgagacaaatggcagtattcatccacaattttaaaagaaaaggggggattggggggtacagtgcaggggaaagaatagtagacataatagcaacagacatacaaactaaag

SEQ ID NO: 17763 - DNA, 301 bp, Artificial Sequence
  Kmt2c.2_NTC.5
  crRNA array
  misc_feature (148)..(157): n is a, c, g, or t
cttggctttatatatcttgtggaaaggacgaaacaccgtaatttctactaagtgtagatcccaaagatcagcgtggacctaatttctactaagtgtagatgcttacgcgtcgcgaatgtataatttctactaagtgtagatttttttnnnnnnnnnnaagcttggcgtggatccgatatcaactagatcttgagacaaatggcagtattcatccacaattttaaaagaaaaggggggattggggggtacagtgcaggggaaagaatagtagacataatagcaacagacatacaaactaaag

SEQ ID NO: 17764 - DNA, 301 bp, Artificial Sequence
  Kmt2c.2_NTC.50
  crRNA array
  misc_feature (148)..(157): n is a, c, g, or t
cttggctttatatatcttgtggaaaggacgaaacaccgtaatttctactaagtgtagatcccaaagatcagcgtggacctaatttctactaagtgtagatattgccgctcgcgcaaaatctaatttctactaagtgtagatttttttnnnnnnnnnnaagcttggcgtggatccgatatcaactagatcttgagacaaatggcagtattcatccacaattttaaaagaaaaggggggattggggggtacagtgcaggggaaagaatagtagacataatagcaacagacatacaaactaaag

SEQ ID NO: 17765 - DNA, 301 bp, Artificial Sequence
  Kmt2c.2_NTC.51
  crRNA array
  misc_feature (148)..(157): n is a, c, g, or t
cttggctttatatatcttgtggaaaggacgaaacaccgtaatttctactaagtgtagatcccaaagatcagcgtggacctaatttctactaagtgtagattaacgcgcaacacgccaatgtaatttctactaagtgtagatttttttnnnnnnnnnnaagcttggcgtggatccgatatcaactagatcttgagacaaatggcagtattcatccacaattttaaaagaaaaggggggattggggggtacagtgcaggggaaagaatagtagacataatagcaacagacatacaaactaaag

SEQ ID NO: 17766 - DNA, 301 bp, Artificial Sequence
  Kmt2c.2_NTC.6
  crRNA array
  misc_feature (148)..(157): n is a, c, g, or t
cttggctttatatatcttgtggaaaggacgaaacaccgtaatttctactaagtgtagatcccaaagatcagcgtggacctaatttctactaagtgtagatcgaatcgcgcctacgggaattaatttctactaagtgtagatttttttnnnnnnnnnnaagcttggcgtggatccgatatcaactagatcttgagacaaatggcagtattcatccacaattttaaaagaaaaggggggattggggggtacagtgcaggggaaagaatagtagacataatagcaacagacatacaaactaaag

SEQ ID NO: 17767 - DNA, 301 bp, Artificial Sequence
  Kmt2c.2_NTC.7
  crRNA array
  misc_feature (148)..(157): n is a, c, g, or t
cttggctttatatatcttgtggaaaggacgaaacaccgtaatttctactaagtgtagatcccaaagatcagcgtggacctaatttctactaagtgtagatcgccgaacggataagactattaatttctactaagtgtagatttttttnnnnnnnnnnaagcttggcgtggatccgatatcaactagatcttgagacaaatggcagtattcatccacaattttaaaagaaaaggggggattggggggtacagtgcaggggaaagaatagtagacataatagcaacagacatacaaactaaag

SEQ ID NO: 17768 - DNA, 301 bp, Artificial Sequence
  Kmt2c.2_NTC.8
  crRNA array
  misc_feature (148)..(157): n is a, c, g, or t
cttggctttatatatcttgtggaaaggacgaaacaccgtaatttctactaagtgtagatcccaaagatcagcgtggacctaatttctactaagtgtagatcgaccgaggttacgctgggataatttctactaagtgtagatttttttnnnnnnnnnnaagcttggcgtggatccgatatcaactagatcttgagacaaatggcagtattcatccacaattttaaaagaaaaggggggattggggggtacagtgcaggggaaagaatagtagacataatagcaacagacatacaaactaaag

SEQ ID NO: 17769 - DNA, 301 bp, Artificial Sequence
  Kmt2c.2_NTC.9
  crRNA array
  misc_feature (148)..(157): n is a, c, g, or t
cttggctttatatatcttgtggaaaggacgaaacaccgtaatttctactaagtgtagatcccaaagatcagcgtggacctaatttctactaagtgtagatatcgccgtacggctatggcataatttctactaagtgtagatttttttnnnnnnnnnnaagcttggcgtggatccgatatcaactagatcttgagacaaatggcagtattcatccacaattttaaaagaaaaggggggattggggggtacagtgcaggggaaagaatagtagacataatagcaacagacatacaaactaaag

SEQ ID NO: 17770 - DNA, 301 bp, Artificial Sequence
  Kmt2c.3_NTC.0
  crRNA array
  misc_feature (148)..(157): n is a, c, g, or t
cttggctttatatatcttgtggaaaggacgaaacaccgtaatttctactaagtgtagataaaagatccgaatcgatgcgtaatttctactaagtgtagattatagcgtcgcgcgctaatttaatttctactaagtgtagatttttttnnnnnnnnnnaagcttggcgtggatccgatatcaactagatcttgagacaaatggcagtattcatccacaattttaaaagaaaaggggggattggggggtacagtgcaggggaaagaatagtagacataatagcaacagacatacaaactaaag

SEQ ID NO: 17771 - DNA, 301 bp, Artificial Sequence
  Kmt2c.3_NTC.1
  crRNA array
  misc_feature (148)..(157): n is a, c, g, or t
cttggctttatatatcttgtggaaaggacgaaacaccgtaatttctactaagtgtagataaaagatccgaatcgatgcgtaatttctactaagtgtagatcgcgtaaccgttccggctcctaatttctactaagtgtagatttttttnnnnnnnnnnaagcttggcgtggatccgatatcaactagatcttgagacaaatggcagtattcatccacaattttaaaagaaaaggggggattggggggtacagtgcaggggaaagaatagtagacataatagcaacagacatacaaactaaag

SEQ ID NO: 17772 - DNA, 301 bp, Artificial Sequence
  Kmt2c.3_NTC.10
  crRNA array
  misc_feature (148)..(157): n is a, c, g, or t
cttggctttatatatcttgtggaaaggacgaaacaccgtaatttctactaagtgtagataaaagatccgaatcgatgcgtaatttctactaagtgtagatcgctaagttcgcgcgggccgtaatttctactaagtgtagatttttttnnnnnnnnnnaagcttggcgtggatccgatatcaactagatcttgagacaaatggcagtattcatccacaattttaaaagaaaaggggggattggggggtacagtgcaggggaaagaatagtagacataatagcaacagacatacaaactaaag

SEQ ID NO: 17773 - DNA, 301 bp, Artificial Sequence
  Kmt2c.3_NTC.11
  crRNA array
  misc_feature (148)..(157): n is a, c, g, or t
cttggctttatatatcttgtggaaaggacgaaacaccgtaatttctactaagtgtagataaaagatccgaatcgatgcgtaatttctactaagtgtagatcgttcgtcgacgaagcaatctaatttctactaagtgtagatttttttnnnnnnnnnnaagcttggcgtggatccgatatcaactagatcttgagacaaatggcagtattcatccacaattttaaaagaaaaggggggattggggggtacagtgcaggggaaagaatagtagacataatagcaacagacatacaaactaaag

SEQ ID NO: 17774 - DNA, 301 bp, Artificial Sequence
  Kmt2c.3_NTC.12
  crRNA array
  misc_feature (148)..(157): n is a, c, g, or t
cttggctttatatatcttgtggaaaggacgaaacaccgtaatttctactaagtgtagataaaagatccgaatcgatgcgtaatttctactaagtgtagatcgccgacgattaatcaatagtaatttctactaagtgtagatttttttnnnnnnnnnnaagcttggcgtggatccgatatcaactagatcttgagacaaatggcagtattcatccacaattttaaaagaaaaggggggattggggggtacagtgcaggggaaagaatagtagacataatagcaacagacatacaaactaaag

SEQ ID NO: 17775 - DNA, 301 bp, Artificial Sequence
  Kmt2c.3_NTC.13
  crRNA array
  misc_feature (148)..(157): n is a, c, g, or t
cttggctttatatatcttgtggaaaggacgaaacaccgtaatttctactaagtgtagataaaagatccgaatcgatgcgtaatttctactaagtgtagatgaccgttgtatcgcgatcaataatttctactaagtgtagatttttttnnnnnnnnnnaagcttggcgtggatccgatatcaactagatcttgagacaaatggcagtattcatccacaattttaaaagaaaaggggggattggggggtacagtgcaggggaaagaatagtagacataatagcaacagacatacaaactaaag

SEQ ID NO: 17776 - DNA, 301 bp, Artificial Sequence
  Kmt2c.3_NTC.14
  crRNA array
  misc_feature (148)..(157): n is a, c, g, or t
cttggctttatatatcttgtggaaaggacgaaacaccgtaatttctactaagtgtagataaaagatccgaatcgatgcgtaatttctactaagtgtagatccgttcgtgcgatagtgttttaatttctactaagtgtagatttttttnnnnnnnnnnaagcttggcgtggatccgatatcaactagatcttgagacaaatggcagtattcatccacaattttaaaagaaaaggggggattggggggtacagtgcaggggaaagaatagtagacataatagcaacagacatacaaactaaag

SEQ ID NO: 17777 - DNA, 301 bp, Artificial Sequence
  Kmt2c.3_NTC.15
  crRNA array
  misc_feature (148)..(157): n is a, c, g, or t
cttggctttatatatcttgtggaaaggacgaaacaccgtaatttctactaagtgtagataaaagatccgaatcgatgcgtaatttctactaagtgtagatgttgtcgtgccgcgaatttataatttctactaagtgtagatttttttnnnnnnnnnnaagcttggcgtggatccgatatcaactagatcttgagacaaatggcagtattcatccacaattttaaaagaaaaggggggattggggggtacagtgcaggggaaagaatagtagacataatagcaacagacatacaaactaaag

SEQ ID NO: 17778 - DNA, 301 bp, Artificial Sequence
  Kmt2c.3_NTC.16
  crRNA array
  misc_feature (148)..(157): n is a, c, g, or t
cttggctttatatatcttgtggaaaggacgaaacaccgtaatttctactaagtgtagataaaagatccgaatcgatgcgtaatttctactaagtgtagatcggtacgttagacgaaaatttaatttctactaagtgtagatttttttnnnnnnnnnnaagcttggcgtggatccgatatcaactagatcttgagacaaatggcagtattcatccacaattttaaaagaaaaggggggattggggggtacagtgcaggggaaagaatagtagacataatagcaacagacatacaaactaaag

SEQ ID NO: 17779 - DNA, 301 bp, Artificial Sequence
  Kmt2c.3_NTC.17
  crRNA array
  misc_feature (148)..(157): n is a, c, g, or t
cttggctttatatatcttgtggaaaggacgaaacaccgtaatttctactaagtgtagataaaagatccgaatcgatgcgtaatttctactaagtgtagattatcgaacgctatcgaacgttaatttctactaagtgtagatttttttnnnnnnnnnnaagcttggcgtggatccgatatcaactagatcttgagacaaatggcagtattcatccacaattttaaaagaaaaggggggattggggggtacagtgcaggggaaagaatagtagacataatagcaacagacatacaaactaaag

SEQ ID NO: 17780 - DNA, 301 bp, Artificial Sequence
  Kmt2c.3_NTC.18
  crRNA array
  misc_feature (148)..(157): n is a, c, g, or t
cttggctttatatatcttgtggaaaggacgaaacaccgtaatttctactaagtgtagataaaagatccgaatcgatgcgtaatttctactaagtgtagattccggttacgaccggcaaaataatttctactaagtgtagatttttttnnnnnnnnnnaagcttggcgtggatccgatatcaactagatcttgagacaaatggcagtattcatccacaattttaaaagaaaaggggggattggggggtacagtgcaggggaaagaatagtagacataatagcaacagacatacaaactaaag

SEQ ID NO: 17781 - DNA, 301 bp, Artificial Sequence
  Kmt2c.3_NTC.19
  crRNA array
  misc_feature (148)..(157): n is a, c, g, or t
cttggctttatatatcttgtggaaaggacgaaacaccgtaatttctactaagtgtagataaaagatccgaatcgatgcgtaatttctactaagtgtagatcgtcgtagaacgatacccgataatttctactaagtgtagatttttttnnnnnnnnnnaagcttggcgtggatccgatatcaactagatcttgagacaaatggcagtattcatccacaattttaaaagaaaaggggggattggggggtacagtgcaggggaaagaatagtagacataatagcaacagacatacaaactaaag

SEQ ID NO: 17782 - DNA, 301 bp, Artificial Sequence
  Kmt2c.3_NTC.2
  crRNA array
  misc_feature (148)..(157): n is a, c, g, or t
cttggctttatatatcttgtggaaaggacgaaacaccgtaatttctactaagtgtagataaaagatccgaatcgatgcgtaatttctactaagtgtagatttatgtcgcgccgcgacccgtaatttctactaagtgtagatttttttnnnnnnnnnnaagcttggcgtggatccgatatcaactagatcttgagacaaatggcagtattcatccacaattttaaaagaaaaggggggattggggggtacagtgcaggggaaagaatagtagacataatagcaacagacatacaaactaaag

SEQ ID NO: 17783 - DNA, 301 bp, Artificial Sequence
  Kmt2c.3_NTC.20
  crRNA array
  misc_feature (148)..(157): n is a, c, g, or t
cttggctttatatatcttgtggaaaggacgaaacaccgtaatttctactaagtgtagataaaagatccgaatcgatgcgtaatttctactaagtgtagatattccggcgcgaccagaagataatttctactaagtgtagatttttttnnnnnnnnnnaagcttggcgtggatccgatatcaactagatcttgagacaaatggcagtattcatccacaattttaaaagaaaaggggggattggggggtacagtgcaggggaaagaatagtagacataatagcaacagacatacaaactaaag

SEQ ID NO: 17784 - DNA, 301 bp, Artificial Sequence
  Kmt2c.3_NTC.21
  crRNA array
  misc_feature (148)..(157): n is a, c, g, or t
cttggctttatatatcttgtggaaaggacgaaacaccgtaatttctactaagtgtagataaaagatccgaatcgatgcgtaatttctactaagtgtagatgtataacttcgcgcggtccgtaatttctactaagtgtagatttttttnnnnnnnnnnaagcttggcgtggatccgatatcaactagatcttgagacaaatggcagtattcatccacaattttaaaagaaaaggggggattggggggtacagtgcaggggaaagaatagtagacataatagcaacagacatacaaactaaag

SEQ ID NO: 17785 - DNA, 301 bp, Artificial Sequence
  Kmt2c.3_NTC.22
  crRNA array
  misc_feature (148)..(157): n is a, c, g, or t
cttggctttatatatcttgtggaaaggacgaaacaccgtaatttctactaagtgtagataaaagatccgaatcgatgcgtaatttctactaagtgtagatgcgcgtcaacgtaatgtgcctaatttctactaagtgtagatttttttnnnnnnnnnnaagcttggcgtggatccgatatcaactagatcttgagacaaatggcagtattcatccacaattttaaaagaaaaggggggattggggggtacagtgcaggggaaagaatagtagacataatagcaacagacatacaaactaaag

SEQ ID NO: 17786 - DNA, 301 bp, Artificial Sequence
  Kmt2c.3_NTC.23
  crRNA array
  misc_feature (148)..(157): n is a, c, g, or t
cttggctttatatatcttgtggaaaggacgaaacaccgtaatttctactaagtgtagataaaagatccgaatcgatgcgtaatttctactaagtgtagatacgcgctattatcgtaggtgtaatttctactaagtgtagatttttttnnnnnnnnnnaagcttggcgtggatccgatatcaactagatcttgagacaaatggcagtattcatccacaattttaaaagaaaaggggggattggggggtacagtgcaggggaaagaatagtagacataatagcaacagacatacaaactaaag

SEQ ID NO: 17787 - DNA, 301 bp, Artificial Sequence
  Kmt2c.3_NTC.24
  crRNA array
  misc_feature (148)..(157): n is a, c, g, or t
cttggctttatatatcttgtggaaaggacgaaacaccgtaatttctactaagtgtagataaaagatccgaatcgatgcgtaatttctactaagtgtagatactatcgacgttcgtcccggtaatttctactaagtgtagatttttttnnnnnnnnnnaagcttggcgtggatccgatatcaactagatcttgagacaaatggcagtattcatccacaattttaaaagaaaaggggggattggggggtacagtgcaggggaaagaatagtagacataatagcaacagacatacaaactaaag

SEQ ID NO: 17788 - DNA, 301 bp, Artificial Sequence
  Kmt2c.3_NTC.25
  crRNA array
  misc_feature (148)..(157): n is a, c, g, or t
cttggctttatatatcttgtggaaaggacgaaacaccgtaatttctactaagtgtagataaaagatccgaatcgatgcgtaatttctactaagtgtagattcgcgttatcgtgccgtgcgtaatttctactaagtgtagatttttttnnnnnnnnnnaagcttggcgtggatccgatatcaactagatcttgagacaaatggcagtattcatccacaattttaaaagaaaaggggggattggggggtacagtgcaggggaaagaatagtagacataatagcaacagacatacaaactaaag

SEQ ID NO: 17789 - DNA, 301 bp, Artificial Sequence
  Kmt2c.3_NTC.26
  crRNA array
  misc_feature (148)..(157): n is a, c, g, or t
cttggctttatatatcttgtggaaaggacgaaacaccgtaatttctactaagtgtagataaaagatccgaatcgatgcgtaatttctactaagtgtagatcgcgacggcggttttaacactaatttctactaagtgtagatttttttnnnnnnnnnnaagcttggcgtggatccgatatcaactagatcttgagacaaatggcagtattcatccacaattttaaaagaaaaggggggattggggggtacagtgcaggggaaagaatagtagacataatagcaacagacatacaaactaaag

SEQ ID NO: 17790 - DNA, 301 bp, Artificial Sequence
  Kmt2c.3_NTC.27
  crRNA array
  misc_feature (148)..(157): n is a, c, g, or t
cttggctttatatatcttgtggaaaggacgaaacaccgtaatttctactaagtgtagataaaagatccgaatcgatgcgtaatttctactaagtgtagatgtcgcgttgcgaccggcgcttaatttctactaagtgtagatttttttnnnnnnnnnnaagcttggcgtggatccgatatcaactagatcttgagacaaatggcagtattcatccacaattttaaaagaaaaggggggattggggggtacagtgcaggggaaagaatagtagacataatagcaacagacatacaaactaaag

SEQ ID NO: 17791 - DNA, 301 bp, Artificial Sequence
  Kmt2c.3_NTC.28
  crRNA array
  misc_feature (148)..(157): n is a, c, g, or t
cttggctttatatatcttgtggaaaggacgaaacaccgtaatttctactaagtgtagataaaagatccgaatcgatgcgtaatttctactaagtgtagataccgctaatcggcgtaaacttaatttctactaagtgtagatttttttnnnnnnnnnnaagcttggcgtggatccgatatcaactagatcttgagacaaatggcagtattcatccacaattttaaaagaaaaggggggattggggggtacagtgcaggggaaagaatagtagacataatagcaacagacatacaaactaaag

SEQ ID NO: 17792 - DNA, 301 bp, Artificial Sequence
  Kmt2c.3_NTC.29
  crRNA array
  misc_feature (148)..(157): n is a, c, g, or t
cttggctttatatatcttgtggaaaggacgaaacaccgtaatttctactaagtgtagataaaagatccgaatcgatgcgtaatttctactaagtgtagatcgcgatctataccgtctatataatttctactaagtgtagatttttttnnnnnnnnnnaagcttggcgtggatccgatatcaactagatcttgagacaaatggcagtattcatccacaattttaaaagaaaaggggggattggggggtacagtgcaggggaaagaatagtagacataatagcaacagacatacaaactaaag

SEQ ID NO: 17793 - DNA, 301 bp, Artificial Sequence
  Kmt2c.3_NTC.3
  crRNA array
  misc_feature (148)..(157): n is a, c, g, or t
cttggctttatatatcttgtggaaaggacgaaacaccgtaatttctactaagtgtagataaaagatccgaatcgatgcgtaatttctactaagtgtagattcgacgcgagacgacgtacataatttctactaagtgtagatttttttnnnnnnnnnnaagcttggcgtggatccgatatcaactagatcttgagacaaatggcagtattcatccacaattttaaaagaaaaggggggattggggggtacagtgcaggggaaagaatagtagacataatagcaacagacatacaaactaaag

SEQ ID NO: 17794 - DNA, 301 bp, Artificial Sequence
  Kmt2c.3_NTC.30
  crRNA array
  misc_feature (148)..(157): n is a, c, g, or t
cttggctttatatatcttgtggaaaggacgaaacaccgtaatttctactaagtgtagataaaagatccgaatcgatgcgtaatttctactaagtgtagatcgatcgtacgggtgtcctaataatttctactaagtgtagatttttttnnnnnnnnnnaagcttggcgtggatccgatatcaactagatcttgagacaaatggcagtattcatccacaattttaaaagaaaaggggggattggggggtacagtgcaggggaaagaatagtagacataatagcaacagacatacaaactaaag

SEQ ID NO: 17795 - DNA, 301 bp, Artificial Sequence
  Kmt2c.3_NTC.31
  crRNA array
  misc_feature (148)..(157): n is a, c, g, or t
cttggctttatatatcttgtggaaaggacgaaacaccgtaatttctactaagtgtagataaaagatccgaatcgatgcgtaatttctactaagtgtagatgccgaccgcgtgattgtaggtaatttctactaagtgtagatttttttnnnnnnnnnnaagcttggcgtggatccgatatcaactagatcttgagacaaatggcagtattcatccacaattttaaaagaaaaggggggattggggggtacagtgcaggggaaagaatagtagacataatagcaacagacatacaaactaaag

SEQ ID NO: 17796 - DNA, 301 bp, Artificial Sequence
  Kmt2c.3_NTC.32
  crRNA array
  misc_feature (148)..(157): n is a, c, g, or t
cttggctttatatatcttgtggaaaggacgaaacaccgtaatttctactaagtgtagataaaagatccgaatcgatgcgtaatttctactaagtgtagatgcacgttacgcccgggtcactaatttctactaagtgtagatttttttnnnnnnnnnnaagcttggcgtggatccgatatcaactagatcttgagacaaatggcagtattcatccacaattttaaaagaaaaggggggattggggggtacagtgcaggggaaagaatagtagacataatagcaacagacatacaaactaaag

SEQ ID NO: 17797 - DNA, 301 bp, Artificial Sequence
  Kmt2c.3_NTC.33
  crRNA array
  misc_feature (148)..(157): n is a, c, g, or t
cttggctttatatatcttgtggaaaggacgaaacaccgtaatttctactaagtgtagataaaagatccgaatcgatgcgtaatttctactaagtgtagattaagcgaccgacgcattcgctaatttctactaagtgtagatttttttnnnnnnnnnnaagcttggcgtggatccgatatcaactagatcttgagacaaatggcagtattcatccacaattttaaaagaaaaggggggattggggggtacagtgcaggggaaagaatagtagacataatagcaacagacatacaaactaaag

SEQ ID NO: 17798 - DNA, 301 bp, Artificial Sequence
  Kmt2c.3_NTC.34
  crRNA array
  misc_feature (148)..(157): n is a, c, g, or t
cttggctttatatatcttgtggaaaggacgaaacaccgtaatttctactaagtgtagataaaagatccgaatcgatgcgtaatttctactaagtgtagattagcgttcgacacgtgaaactaatttctactaagtgtagatttttttnnnnnnnnnnaagcttggcgtggatccgatatcaactagatcttgagacaaatggcagtattcatccacaattttaaaagaaaaggggggattggggggtacagtgcaggggaaagaatagtagacataatagcaacagacatacaaactaaag

SEQ ID NO: 17799 - DNA, 301 bp, Artificial Sequence
  Kmt2c.3_NTC.35
  crRNA array
  misc_feature (148)..(157): n is a, c, g, or t
cttggctttatatatcttgtggaaaggacgaaacaccgtaatttctactaagtgtagataaaagatccgaatcgatgcgtaatttctactaagtgtagattggcgcgtaatcgctattcgtaatttctactaagtgtagatttttttnnnnnnnnnnaagcttggcgtggatccgatatcaactagatcttgagacaaatggcagtattcatccacaattttaaaagaaaaggggggattggggggtacagtgcaggggaaagaatagtagacataatagcaacagacatacaaactaaag

SEQ ID NO: 17800 - DNA, 301 bp, Artificial Sequence
  Kmt2c.3_NTC.36
  crRNA array
  misc_feature (148)..(157): n is a, c, g, or t
cttggctttatatatcttgtggaaaggacgaaacaccgtaatttctactaagtgtagataaaagatccgaatcgatgcgtaatttctactaagtgtagatcaacccgccgtagcgggccttaatttctactaagtgtagatttttttnnnnnnnnnnaagcttggcgtggatccgatatcaactagatcttgagacaaatggcagtattcatccacaattttaaaagaaaaggggggattggggggtacagtgcaggggaaagaatagtagacataatagcaacagacatacaaactaaag

SEQ ID NO: 17801 - DNA, 301 bp, Artificial Sequence
  Kmt2c.3_NTC.37
  crRNA array
  misc_feature (148)..(157): n is a, c, g, or t
cttggctttatatatcttgtggaaaggacgaaacaccgtaatttctactaagtgtagataaaagatccgaatcgatgcgtaatttctactaagtgtagattttgcgttgacgcgattacttaatttctactaagtgtagatttttttnnnnnnnnnnaagcttggcgtggatccgatatcaactagatcttgagacaaatggcagtattcatccacaattttaaaagaaaaggggggattggggggtacagtgcaggggaaagaatagtagacataatagcaacagacatacaaactaaag

SEQ ID NO: 17802 - DNA, 301 bp, Artificial Sequence
  Kmt2c.3_NTC.38
  crRNA array
  misc_feature (148)..(157): n is a, c, g, or t
cttggctttatatatcttgtggaaaggacgaaacaccgtaatttctactaagtgtagataaaagatccgaatcgatgcgtaatttctactaagtgtagataacggagcgcgatactaccataatttctactaagtgtagatttttttnnnnnnnnnnaagcttggcgtggatccgatatcaactagatcttgagacaaatggcagtattcatccacaattttaaaagaaaaggggggattggggggtacagtgcaggggaaagaatagtagacataatagcaacagacatacaaactaaag

SEQ ID NO: 17803 - DNA, 301 bp, Artificial Sequence
  Kmt2c.3_NTC.39
  crRNA array
  misc_feature (148)..(157): n is a, c, g, or t
cttggctttatatatcttgtggaaaggacgaaacaccgtaatttctactaagtgtagataaaagatccgaatcgatgcgtaatttctactaagtgtagatccggacgttataacgtttcttaatttctactaagtgtagatttttttnnnnnnnnnnaagcttggcgtggatccgatatcaactagatcttgagacaaatggcagtattcatccacaattttaaaagaaaaggggggattggggggtacagtgcaggggaaagaatagtagacataatagcaacagacatacaaactaaag

SEQ ID NO: 17804 - DNA, 301 bp, Artificial Sequence
  Kmt2c.3_NTC.4
  crRNA array
  misc_feature (148)..(157): n is a, c, g, or t
cttggctttatatatcttgtggaaaggacgaaacaccgtaatttctactaagtgtagataaaagatccgaatcgatgcgtaatttctactaagtgtagatatacccgtcgcgaacgtgagtaatttctactaagtgtagatttttttnnnnnnnnnnaagcttggcgtggatccgatatcaactagatcttgagacaaatggcagtattcatccacaattttaaaagaaaaggggggattggggggtacagtgcaggggaaagaatagtagacataatagcaacagacatacaaactaaag

SEQ ID NO: 17805 - DNA, 301 bp, Artificial Sequence
  Kmt2c.3_NTC.40
  crRNA array
  misc_feature (148)..(157): n is a, c, g, or t
cttggctttatatatcttgtggaaaggacgaaacaccgtaatttctactaagtgtagataaaagatccgaatcgatgcgtaatttctactaagtgtagatattcgcgaacccggccggaataatttctactaagtgtagatttttttnnnnnnnnnnaagcttggcgtggatccgatatcaactagatcttgagacaaatggcagtattcatccacaattttaaaagaaaaggggggattggggggtacagtgcaggggaaagaatagtagacataatagcaacagacatacaaactaaag

SEQ ID NO: 17806 - DNA, 301 bp, Artificial Sequence
  Kmt2c.3_NTC.41
  crRNA array
  misc_feature (148)..(157): n is a, c, g, or t
cttggctttatatatcttgtggaaaggacgaaacaccgtaatttctactaagtgtagataaaagatccgaatcgatgcgtaatttctactaagtgtagatttgatggcgcgacgcgttattaatttctactaagtgtagatttttttnnnnnnnnnnaagcttggcgtggatccgatatcaactagatcttgagacaaatggcagtattcatccacaattttaaaagaaaaggggggattggggggtacagtgcaggggaaagaatagtagacataatagcaacagacatacaaactaaag

SEQ ID NO: 17807 - DNA, 301 bp, Artificial Sequence
  Kmt2c.3_NTC.42
  crRNA array
  misc_feature (148)..(157): n is a, c, g, or t
cttggctttatatatcttgtggaaaggacgaaacaccgtaatttctactaagtgtagataaaagatccgaatcgatgcgtaatttctactaagtgtagatggtcaaatcgcggcgataactaatttctactaagtgtagatttttttnnnnnnnnnnaagcttggcgtggatccgatatcaactagatcttgagacaaatggcagtattcatccacaattttaaaagaaaaggggggattggggggtacagtgcaggggaaagaatagtagacataatagcaacagacatacaaactaaag

SEQ ID NO: 17808 - DNA, 301 bp, Artificial Sequence
  Kmt2c.3_NTC.43
  crRNA array
  misc_feature (148)..(157): n is a, c, g, or t
cttggctttatatatcttgtggaaaggacgaaacaccgtaatttctactaagtgtagataaaagatccgaatcgatgcgtaatttctactaagtgtagatcgactcgcgcattgaactggtaatttctactaagtgtagatttttttnnnnnnnnnnaagcttggcgtggatccgatatcaactagatcttgagacaaatggcagtattcatccacaattttaaaagaaaaggggggattggggggtacagtgcaggggaaagaatagtagacataatagcaacagacatacaaactaaag

SEQ ID NO: 17809 - DNA, 301 bp, Artificial Sequence
  Kmt2c.3_NTC.44
  crRNA array
  misc_feature (148)..(157): n is a, c, g, or t
cttggctttatatatcttgtggaaaggacgaaacaccgtaatttctactaagtgtagataaaagatccgaatcgatgcgtaatttctactaagtgtagatagcgtcgtacgatttatcgttaatttctactaagtgtagatttttttnnnnnnnnnnaagcttggcgtggatccgatatcaactagatcttgagacaaatggcagtattcatccacaattttaaaagaaaaggggggattggggggtacagtgcaggggaaagaatagtagacataatagcaacagacatacaaactaaag

SEQ ID NO: 17810 - DNA, 301 bp, Artificial Sequence
  Kmt2c.3_NTC.45
  crRNA array
  misc_feature (148)..(157): n is a, c, g, or t
cttggctttatatatcttgtggaaaggacgaaacaccgtaatttctactaagtgtagataaaagatccgaatcgatgcgtaatttctactaagtgtagatcggaacgcgtgatactagggtaatttctactaagtgtagatttttttnnnnnnnnnnaagcttggcgtggatccgatatcaactagatcttgagacaaatggcagtattcatccacaattttaaaagaaaaggggggattggggggtacagtgcaggggaaagaatagtagacataatagcaacagacatacaaactaaag

SEQ ID NO: 17811 - DNA, 301 bp, Artificial Sequence
  Kmt2c.3_NTC.46
  crRNA array
  misc_feature (148)..(157): n is a, c, g, or t
cttggctttatatatcttgtggaaaggacgaaacaccgtaatttctactaagtgtagataaaagatccgaatcgatgcgtaatttctactaagtgtagatagcgggtcgtagacgcgcggtaatttctactaagtgtagatttttttnnnnnnnnnnaagcttggcgtggatccgatatcaactagatcttgagacaaatggcagtattcatccacaattttaaaagaaaaggggggattggggggtacagtgcaggggaaagaatagtagacataatagcaacagacatacaaactaaag

SEQ ID NO: 17812 - DNA, 301 bp, Artificial Sequence
  Kmt2c.3_NTC.47
  crRNA array
  misc_feature (148)..(157): n is a, c, g, or t
cttggctttatatatcttgtggaaaggacgaaacaccgtaatttctactaagtgtagataaaagatccgaatcgatgcgtaatttctactaagtgtagattctcgtatcgcgattgttaataatttctactaagtgtagatttttttnnnnnnnnnnaagcttggcgtggatccgatatcaactagatcttgagacaaatggcagtattcatccacaattttaaaagaaaaggggggattggggggtacagtgcaggggaaagaatagtagacataatagcaacagacatacaaactaaag

SEQ ID NO: 17813 - DNA, 301 bp, Artificial Sequence
  Kmt2c.3_NTC.48
  crRNA array
  misc_feature (148)..(157): n is a, c, g, or t
cttggctttatatatcttgtggaaaggacgaaacaccgtaatttctactaagtgtagataaaagatccgaatcgatgcgtaatttctactaagtgtagatcggtcgactacggctgttagtaatttctactaagtgtagatttttttnnnnnnnnnnaagcttggcgtggatccgatatcaactagatcttgagacaaatggcagtattcatccacaattttaaaagaaaaggggggattggggggtacagtgcaggggaaagaatagtagacataatagcaacagacatacaaactaaag

SEQ ID NO: 17814 - DNA, 301 bp, Artificial Sequence
  Kmt2c.3_NTC.49
  crRNA array
  misc_feature (148)..(157): n is a, c, g, or t
cttggctttatatatcttgtggaaaggacgaaacaccgtaatttctactaagtgtagataaaagatccgaatcgatgcgtaatttctactaagtgtagattcggggcgcgtcaactgaattaatttctactaagtgtagatttttttnnnnnnnnnnaagcttggcgtggatccgatatcaactagatcttgagacaaatggcagtattcatccacaattttaaaagaaaaggggggattggggggtacagtgcaggggaaagaatagtagacataatagcaacagacatacaaactaaag

SEQ ID NO: 17815 - DNA, 301 bp, Artificial Sequence
  Kmt2c.3_NTC.5
  crRNA array
  misc_feature (148)..(157): n is a, c, g, or t
cttggctttatatatcttgtggaaaggacgaaacaccgtaatttctactaagtgtagataaaagatccgaatcgatgcgtaatttctactaagtgtagatgcttacgcgtcgcgaatgtataatttctactaagtgtagatttttttnnnnnnnnnnaagcttggcgtggatccgatatcaactagatcttgagacaaatggcagtattcatccacaattttaaaagaaaaggggggattggggggtacagtgcaggggaaagaatagtagacataatagcaacagacatacaaactaaag

SEQ ID NO: 17816 - DNA, 301 bp, Artificial Sequence
  Kmt2c.3_NTC.50
  crRNA array
  misc_feature (148)..(157): n is a, c, g, or t
cttggctttatatatcttgtggaaaggacgaaacaccgtaatttctactaagtgtagataaaagatccgaatcgatgcgtaatttctactaagtgtagatattgccgctcgcgcaaaatctaatttctactaagtgtagatttttttnnnnnnnnnnaagcttggcgtggatccgatatcaactagatcttgagacaaatggcagtattcatccacaattttaaaagaaaaggggggattggggggtacagtgcaggggaaagaatagtagacataatagcaacagacatacaaactaaag

SEQ ID NO: 17817 - DNA, 301 bp, Artificial Sequence
  Kmt2c.3_NTC.51
  crRNA array
  misc_feature (148)..(157): n is a, c, g, or t
cttggctttatatatcttgtggaaaggacgaaacaccgtaatttctactaagtgtagataaaagatccgaatcgatgcgtaatttctactaagtgtagattaacgcgcaacacgccaatgtaatttctactaagtgtagatttttttnnnnnnnnnnaagcttggcgtggatccgatatcaactagatcttgagacaaatggcagtattcatccacaattttaaaagaaaaggggggattggggggtacagtgcaggggaaagaatagtagacataatagcaacagacatacaaactaaag

SEQ ID NO: 17818 - DNA, 301 bp, Artificial Sequence
  Kmt2c.3_NTC.6
  crRNA array
  misc_feature (148)..(157): n is a, c, g, or t
cttggctttatatatcttgtggaaaggacgaaacaccgtaatttctactaagtgtagataaaagatccgaatcgatgcgtaatttctactaagtgtagatcgaatcgcgcctacgggaattaatttctactaagtgtagatttttttnnnnnnnnnnaagcttggcgtggatccgatatcaactagatcttgagacaaatggcagtattcatccacaattttaaaagaaaaggggggattggggggtacagtgcaggggaaagaatagtagacataatagcaacagacatacaaactaaag

SEQ ID NO: 17819 - DNA, 301 bp, Artificial Sequence
  Kmt2c.3_NTC.7
  crRNA array
  misc_feature (148)..(157): n is a, c, g, or t
cttggctttatatatcttgtggaaaggacgaaacaccgtaatttctactaagtgtagataaaagatccgaatcgatgcgtaatttctactaagtgtagatcgccgaacggataagactattaatttctactaagtgtagatttttttnnnnnnnnnnaagcttggcgtggatccgatatcaactagatcttgagacaaatggcagtattcatccacaattttaaaagaaaaggggggattggggggtacagtgcaggggaaagaatagtagacataatagcaacagacatacaaactaaag

SEQ ID NO: 17820 - DNA, 301 bp, Artificial Sequence
  Kmt2c.3_NTC.8
  crRNA array
  misc_feature (148)..(157): n is a, c, g, or t
cttggctttatatatcttgtggaaaggacgaaacaccgtaatttctactaagtgtagataaaagatccgaatcgatgcgtaatttctactaagtgtagatcgaccgaggttacgctgggataatttctactaagtgtagatttttttnnnnnnnnnnaagcttggcgtggatccgatatcaactagatcttgagacaaatggcagtattcatccacaattttaaaagaaaaggggggattggggggtacagtgcaggggaaagaatagtagacataatagcaacagacatacaaactaaag

SEQ ID NO: 17821 - DNA, 301 bp, Artificial Sequence
  Kmt2c.3_NTC.9
  crRNA array
  misc_feature (148)..(157): n is a, c, g, or t
cttggctttatatatcttgtggaaaggacgaaacaccgtaatttctactaagtgtagataaaagatccgaatcgatgcgtaatttctactaagtgtagatatcgccgtacggctatggcataatttctactaagtgtagatttttttnnnnnnnnnnaagcttggcgtggatccgatatcaactagatcttgagacaaatggcagtattcatccacaattttaaaagaaaaggggggattggggggtacagtgcaggggaaagaatagtagacataatagcaacagacatacaaactaaag

SEQ ID NO: 17822 - DNA, 301 bp, Artificial Sequence
  Kmt2c.4_NTC.0
  crRNA array
  misc_feature (148)..(157): n is a, c, g, or t
cttggctttatatatcttgtggaaaggacgaaacaccgtaatttctactaagtgtagatctgaggcacatggaagcgattaatttctactaagtgtagattatagcgtcgcgcgctaatttaatttctactaagtgtagatttttttnnnnnnnnnnaagcttggcgtggatccgatatcaactagatcttgagacaaatggcagtattcatccacaattttaaaagaaaaggggggattggggggtacagtgcaggggaaagaatagtagacataatagcaacagacatacaaactaaag

SEQ ID NO: 17823 - DNA, 301 bp, Artificial Sequence
  Kmt2c.4_NTC.1
  crRNA array
  misc_feature (148)..(157): n is a, c, g, or t
cttggctttatatatcttgtggaaaggacgaaacaccgtaatttctactaagtgtagatctgaggcacatggaagcgattaatttctactaagtgtagatcgcgtaaccgttccggctcctaatttctactaagtgtagatttttttnnnnnnnnnnaagcttggcgtggatccgatatcaactagatcttgagacaaatggcagtattcatccacaattttaaaagaaaaggggggattggggggtacagtgcaggggaaagaatagtagacataatagcaacagacatacaaactaaag

SEQ ID NO: 17824 - DNA, 301 bp, Artificial Sequence
  Kmt2c.4_NTC.10
  crRNA array
  misc_feature (148)..(157): n is a, c, g, or t
cttggctttatatatcttgtggaaaggacgaaacaccgtaatttctactaagtgtagatctgaggcacatggaagcgattaatttctactaagtgtagatcgctaagttcgcgcgggccgtaatttctactaagtgtagatttttttnnnnnnnnnnaagcttggcgtggatccgatatcaactagatcttgagacaaatggcagtattcatccacaattttaaaagaaaaggggggattggggggtacagtgcaggggaaagaatagtagacataatagcaacagacatacaaactaaag

SEQ ID NO: 17825 - DNA, 301 bp, Artificial Sequence
  Kmt2c.4_NTC.11
  crRNA array
  misc_feature (148)..(157): n is a, c, g, or t
cttggctttatatatcttgtggaaaggacgaaacaccgtaatttctactaagtgtagatctgaggcacatggaagcgattaatttctactaagtgtagatcgttcgtcgacgaagcaatctaatttctactaagtgtagatttttttnnnnnnnnnnaagcttggcgtggatccgatatcaactagatcttgagacaaatggcagtattcatccacaattttaaaagaaaaggggggattggggggtacagtgcaggggaaagaatagtagacataatagcaacagacatacaaactaaag

SEQ ID NO: 17826 - DNA, 301 bp, Artificial Sequence
  Kmt2c.4_NTC.12
  crRNA array
  misc_feature (148)..(157): n is a, c, g, or t
cttggctttatatatcttgtggaaaggacgaaacaccgtaatttctactaagtgtagatctgaggcacatggaagcgattaatttctactaagtgtagatcgccgacgattaatcaatagtaatttctactaagtgtagatttttttnnnnnnnnnnaagcttggcgtggatccgatatcaactagatcttgagacaaatggcagtattcatccacaattttaaaagaaaaggggggattggggggtacagtgcaggggaaagaatagtagacataatagcaacagacatacaaactaaag

SEQ ID NO: 17827 - DNA, 301 bp, Artificial Sequence
  Kmt2c.4_NTC.13
  crRNA array
  misc_feature (148)..(157): n is a, c, g, or t
cttggctttatatatcttgtggaaaggacgaaacaccgtaatttctactaagtgtagatctgaggcacatggaagcgattaatttctactaagtgtagatgaccgttgtatcgcgatcaataatttctactaagtgtagatttttttnnnnnnnnnnaagcttggcgtggatccgatatcaactagatcttgagacaaatggcagtattcatccacaattttaaaagaaaaggggggattggggggtacagtgcaggggaaagaatagtagacataatagcaacagacatacaaactaaag

SEQ ID NO: 17828 - DNA, 301 bp, Artificial Sequence
  Kmt2c.4_NTC.14
  crRNA array
  misc_feature (148)..(157): n is a, c, g, or t
cttggctttatatatcttgtggaaaggacgaaacaccgtaatttctactaagtgtagatctgaggcacatggaagcgattaatttctactaagtgtagatccgttcgtgcgatagtgttttaatttctactaagtgtagatttttttnnnnnnnnnnaagcttggcgtggatccgatatcaactagatcttgagacaaatggcagtattcatccacaattttaaaagaaaaggggggattggggggtacagtgcaggggaaagaatagtagacataatagcaacagacatacaaactaaag

SEQ ID NO: 17829 - DNA, 301 bp, Artificial Sequence
  Kmt2c.4_NTC.15
  crRNA array
  misc_feature (148)..(157): n is a, c, g, or t
cttggctttatatatcttgtggaaaggacgaaacaccgtaatttctactaagtgtagatctgaggcacatggaagcgattaatttctactaagtgtagatgttgtcgtgccgcgaatttataatttctactaagtgtagatttttttnnnnnnnnnnaagcttggcgtggatccgatatcaactagatcttgagacaaatggcagtattcatccacaattttaaaagaaaaggggggattggggggtacagtgcaggggaaagaatagtagacataatagcaacagacatacaaactaaag

SEQ ID NO: 17830 - DNA, 301 bp, Artificial Sequence
  Kmt2c.4_NTC.16
  crRNA array
  misc_feature (148)..(157): n is a, c, g, or t
cttggctttatatatcttgtggaaaggacgaaacaccgtaatttctactaagtgtagatctgaggcacatggaagcgattaatttctactaagtgtagatcggtacgttagacgaaaatttaatttctactaagtgtagatttttttnnnnnnnnnnaagcttggcgtggatccgatatcaactagatcttgagacaaatggcagtattcatccacaattttaaaagaaaaggggggattggggggtacagtgcaggggaaagaatagtagacataatagcaacagacatacaaactaaag

SEQ ID NO: 17831 - DNA, 301 bp, Artificial Sequence
  Kmt2c.4_NTC.17
  crRNA array
  misc_feature (148)..(157): n is a, c, g, or t
cttggctttatatatcttgtggaaaggacgaaacaccgtaatttctactaagtgtagatctgaggcacatggaagcgattaatttctactaagtgtagattatcgaacgctatcgaacgttaatttctactaagtgtagatttttttnnnnnnnnnnaagcttggcgtggatccgatatcaactagatcttgagacaaatggcagtattcatccacaattttaaaagaaaaggggggattggggggtacagtgcaggggaaagaatagtagacataatagcaacagacatacaaactaaag

SEQ ID NO: 17832 - DNA, 301 bp, Artificial Sequence
  Kmt2c.4_NTC.18
  crRNA array
  misc_feature (148)..(157): n is a, c, g, or t
cttggctttatatatcttgtggaaaggacgaaacaccgtaatttctactaagtgtagatctgaggcacatggaagcgattaatttctactaagtgtagattccggttacgaccggcaaaataatttctactaagtgtagatttttttnnnnnnnnnnaagcttggcgtggatccgatatcaactagatcttgagacaaatggcagtattcatccacaattttaaaagaaaaggggggattggggggtacagtgcaggggaaagaatagtagacataatagcaacagacatacaaactaaag

SEQ ID NO: 17833 - DNA, 301 bp, Artificial Sequence
  Kmt2c.4_NTC.19
  crRNA array
  misc_feature (148)..(157): n is a, c, g, or t
cttggctttatatatcttgtggaaaggacgaaacaccgtaatttctactaagtgtagatctgaggcacatggaagcgattaatttctactaagtgtagatcgtcgtagaacgatacccgataatttctactaagtgtagatttttttnnnnnnnnnnaagcttggcgtggatccgatatcaactagatcttgagacaaatggcagtattcatccacaattttaaaagaaaaggggggattggggggtacagtgcaggggaaagaatagtagacataatagcaacagacatacaaactaaag

SEQ ID NO: 17834 - DNA, 301 bp, Artificial Sequence
  Kmt2c.4_NTC.2
  crRNA array
  misc_feature (148)..(157): n is a, c, g, or t
cttggctttatatatcttgtggaaaggacgaaacaccgtaatttctactaagtgtagatctgaggcacatggaagcgattaatttctactaagtgtagatttatgtcgcgccgcgacccgtaatttctactaagtgtagatttttttnnnnnnnnnnaagcttggcgtggatccgatatcaactagatcttgagacaaatggcagtattcatccacaattttaaaagaaaaggggggattggggggtacagtgcaggggaaagaatagtagacataatagcaacagacatacaaactaaag

SEQ ID NO: 17835 - DNA, 301 bp, Artificial Sequence
  Kmt2c.4_NTC.20
  crRNA array
  misc_feature (148)..(157): n is a, c, g, or t
cttggctttatatatcttgtggaaaggacgaaacaccgtaatttctactaagtgtagatctgaggcacatggaagcgattaatttctactaagtgtagatattccggcgcgaccagaagataatttctactaagtgtagatttttttnnnnnnnnnnaagcttggcgtggatccgatatcaactagatcttgagacaaatggcagtattcatccacaattttaaaagaaaaggggggattggggggtacagtgcaggggaaagaatagtagacataatagcaacagacatacaaactaaag

SEQ ID NO: 17836 - DNA, 301 bp, Artificial Sequence
  Kmt2c.4_NTC.21
  crRNA array
  misc_feature (148)..(157): n is a, c, g, or t
cttggctttatatatcttgtggaaaggacgaaacaccgtaatttctactaagtgtagatctgaggcacatggaagcgattaatttctactaagtgtagatgtataacttcgcgcggtccgtaatttctactaagtgtagatttttttnnnnnnnnnnaagcttggcgtggatccgatatcaactagatcttgagacaaatggcagtattcatccacaattttaaaagaaaaggggggattggggggtacagtgcaggggaaagaatagtagacataatagcaacagacatacaaactaaag

SEQ ID NO: 17837 - DNA, 301 bp, Artificial Sequence
  Kmt2c.4_NTC.22
  crRNA array
  misc_feature (148)..(157): n is a, c, g, or t
cttggctttatatatcttgtggaaaggacgaaacaccgtaatttctactaagtgtagatctgaggcacatggaagcgattaatttctactaagtgtagatgcgcgtcaacgtaatgtgcctaatttctactaagtgtagatttttttnnnnnnnnnnaagcttggcgtggatccgatatcaactagatcttgagacaaatggcagtattcatccacaattttaaaagaaaaggggggattggggggtacagtgcaggggaaagaatagtagacataatagcaacagacatacaaactaaag

SEQ ID NO: 17838 - DNA, 301 bp, Artificial Sequence
  Kmt2c.4_NTC.23
  crRNA array
  misc_feature (148)..(157): n is a, c, g, or t
cttggctttatatatcttgtggaaaggacgaaacaccgtaatttctactaagtgtagatctgaggcacatggaagcgattaatttctactaagtgtagatacgcgctattatcgtaggtgtaatttctactaagtgtagatttttttnnnnnnnnnnaagcttggcgtggatccgatatcaactagatcttgagacaaatggcagtattcatccacaattttaaaagaaaaggggggattggggggtacagtgcaggggaaagaatagtagacataatagcaacagacatacaaactaaag

SEQ ID NO: 17839 - DNA, 301 bp, Artificial Sequence
  Kmt2c.4_NTC.24
  crRNA array
  misc_feature (148)..(157): n is a, c, g, or t
cttggctttatatatcttgtggaaaggacgaaacaccgtaatttctactaagtgtagatctgaggcacatggaagcgattaatttctactaagtgtagatactatcgacgttcgtcccggtaatttctactaagtgtagatttttttnnnnnnnnnnaagcttggcgtggatccgatatcaactagatcttgagacaaatggcagtattcatccacaattttaaaagaaaaggggggattggggggtacagtgcaggggaaagaatagtagacataatagcaacagacatacaaactaaag

SEQ ID NO: 17840 - DNA, 301 bp, Artificial Sequence
  Kmt2c.4_NTC.25
  crRNA array
  misc_feature (148)..(157): n is a, c, g, or t
cttggctttatatatcttgtggaaaggacgaaacaccgtaatttctactaagtgtagatctgaggcacatggaagcgattaatttctactaagtgtagattcgcgttatcgtgccgtgcgtaatttctactaagtgtagatttttttnnnnnnnnnnaagcttggcgtggatccgatatcaactagatcttgagacaaatggcagtattcatccacaattttaaaagaaaaggggggattggggggtacagtgcaggggaaagaatagtagacataatagcaacagacatacaaactaaag

SEQ ID NO: 17841 - DNA, 301 bp, Artificial Sequence
  Kmt2c.4_NTC.26
  crRNA array
  misc_feature (148)..(157): n is a, c, g, or t
cttggctttatatatcttgtggaaaggacgaaacaccgtaatttctactaagtgtagatctgaggcacatggaagcgattaatttctactaagtgtagatcgcgacggcggttttaacactaatttctactaagtgtagatttttttnnnnnnnnnnaagcttggcgtggatccgatatcaactagatcttgagacaaatggcagtattcatccacaattttaaaagaaaaggggggattggggggtacagtgcaggggaaagaatagtagacataatagcaacagacatacaaactaaag

SEQ ID NO: 17842 - DNA, 301 bp, Artificial Sequence
  Kmt2c.4_NTC.27
  crRNA array
  misc_feature (148)..(157): n is a, c, g, or t
cttggctttatatatcttgtggaaaggacgaaacaccgtaatttctactaagtgtagatctgaggcacatggaagcgattaatttctactaagtgtagatgtcgcgttgcgaccggcgcttaatttctactaagtgtagatttttttnnnnnnnnnnaagcttggcgtggatccgatatcaactagatcttgagacaaatggcagtattcatccacaattttaaaagaaaaggggggattggggggtacagtgcaggggaaagaatagtagacataatagcaacagacatacaaactaaag

SEQ ID NO: 17843 - DNA, 301 bp, Artificial Sequence
  Kmt2c.4_NTC.28
  crRNA array
  misc_feature (148)..(157): n is a, c, g, or t
cttggctttatatatcttgtggaaaggacgaaacaccgtaatttctactaagtgtagatctgaggcacatggaagcgattaatttctactaagtgtagataccgctaatcggcgtaaacttaatttctactaagtgtagatttttttnnnnnnnnnnaagcttggcgtggatccgatatcaactagatcttgagacaaatggcagtattcatccacaattttaaaagaaaaggggggattggggggtacagtgcaggggaaagaatagtagacataatagcaacagacatacaaactaaag

SEQ ID NO: 17844 - DNA, 301 bp, Artificial Sequence
  Kmt2c.4_NTC.29
  crRNA array
  misc_feature (148)..(157): n is a, c, g, or t
cttggctttatatatcttgtggaaaggacgaaacaccgtaatttctactaagtgtagatctgaggcacatggaagcgattaatttctactaagtgtagatcgcgatctataccgtctatataatttctactaagtgtagatttttttnnnnnnnnnnaagcttggcgtggatccgatatcaactagatcttgagacaaatggcagtattcatccacaattttaaaagaaaaggggggattggggggtacagtgcaggggaaagaatagtagacataatagcaacagacatacaaactaaag

SEQ ID NO: 17845 - DNA, 301 bp, Artificial Sequence
  Kmt2c.4_NTC.3
  crRNA array
  misc_feature (148)..(157): n is a, c, g, or t
cttggctttatatatcttgtggaaaggacgaaacaccgtaatttctactaagtgtagatctgaggcacatggaagcgattaatttctactaagtgtagattcgacgcgagacgacgtacataatttctactaagtgtagatttttttnnnnnnnnnnaagcttggcgtggatccgatatcaactagatcttgagacaaatggcagtattcatccacaattttaaaagaaaaggggggattggggggtacagtgcaggggaaagaatagtagacataatagcaacagacatacaaactaaag

SEQ ID NO: 17846 - DNA, 301 bp, Artificial Sequence
  Kmt2c.4_NTC.30
  crRNA array
  misc_feature (148)..(157): n is a, c, g, or t
cttggctttatatatcttgtggaaaggacgaaacaccgtaatttctactaagtgtagatctgaggcacatggaagcgattaatttctactaagtgtagatcgatcgtacgggtgtcctaataatttctactaagtgtagatttttttnnnnnnnnnnaagcttggcgtggatccgatatcaactagatcttgagacaaatggcagtattcatccacaattttaaaagaaaaggggggattggggggtacagtgcaggggaaagaatagtagacataatagcaacagacatacaaactaaag

SEQ ID NO: 17847 - DNA, 301 bp, Artificial Sequence
  Kmt2c.4_NTC.31
  crRNA array
  misc_feature (148)..(157): n is a, c, g, or t
cttggctttatatatcttgtggaaaggacgaaacaccgtaatttctactaagtgtagatctgaggcacatggaagcgattaatttctactaagtgtagatgccgaccgcgtgattgtaggtaatttctactaagtgtagatttttttnnnnnnnnnnaagcttggcgtggatccgatatcaactagatcttgagacaaatggcagtattcatccacaattttaaaagaaaaggggggattggggggtacagtgcaggggaaagaatagtagacataatagcaacagacatacaaactaaag

SEQ ID NO: 17848 - DNA, 301 bp, Artificial Sequence
  Kmt2c.4_NTC.32
  crRNA array
  misc_feature (148)..(157): n is a, c, g, or t
cttggctttatatatcttgtggaaaggacgaaacaccgtaatttctactaagtgtagatctgaggcacatggaagcgattaatttctactaagtgtagatgcacgttacgcccgggtcactaatttctactaagtgtagatttttttnnnnnnnnnnaagcttggcgtggatccgatatcaactagatcttgagacaaatggcagtattcatccacaattttaaaagaaaaggggggattggggggtacagtgcaggggaaagaatagtagacataatagcaacagacatacaaactaaag

SEQ ID NO: 17849 - DNA, 301 bp, Artificial Sequence
  Kmt2c.4_NTC.33
  crRNA array
  misc_feature (148)..(157): n is a, c, g, or t
cttggctttatatatcttgtggaaaggacgaaacaccgtaatttctactaagtgtagatctgaggcacatggaagcgattaatttctactaagtgtagattaagcgaccgacgcattcgctaatttctactaagtgtagatttttttnnnnnnnnnnaagcttggcgtggatccgatatcaactagatcttgagacaaatggcagtattcatccacaattttaaaagaaaaggggggattggggggtacagtgcaggggaaagaatagtagacataatagcaacagacatacaaactaaag

SEQ ID NO: 17850 - DNA, 301 bp, Artificial Sequence
  Kmt2c.4_NTC.34
  crRNA array
  misc_feature (148)..(157): n is a, c, g, or t
cttggctttatatatcttgtggaaaggacgaaacaccgtaatttctactaagtgtagatctgaggcacatggaagcgattaatttctactaagtgtagattagcgttcgacacgtgaaactaatttctactaagtgtagatttttttnnnnnnnnnnaagcttggcgtggatccgatatcaactagatcttgagacaaatggcagtattcatccacaattttaaaagaaaaggggggattggggggtacagtgcaggggaaagaatagtagacataatagcaacagacatacaaactaaag

SEQ ID NO: 17851 - DNA, 301 bp, Artificial Sequence
  Kmt2c.4_NTC.35
  crRNA array
  misc_feature (148)..(157): n is a, c, g, or t
cttggctttatatatcttgtggaaaggacgaaacaccgtaatttctactaagtgtagatctgaggcacatggaagcgattaatttctactaagtgtagattggcgcgtaatcgctattcgtaatttctactaagtgtagatttttttnnnnnnnnnnaagcttggcgtggatccgatatcaactagatcttgagacaaatggcagtattcatccacaattttaaaagaaaaggggggattggggggtacagtgcaggggaaagaatagtagacataatagcaacagacatacaaactaaag

SEQ ID NO: 17852 - DNA, 301 bp, Artificial Sequence
  Kmt2c.4_NTC.36
  crRNA array
  misc_feature (148)..(157): n is a, c, g, or t
cttggctttatatatcttgtggaaaggacgaaacaccgtaatttctactaagtgtagatctgaggcacatggaagcgattaatttctactaagtgtagatcaacccgccgtagcgggccttaatttctactaagtgtagatttttttnnnnnnnnnnaagcttggcgtggatccgatatcaactagatcttgagacaaatggcagtattcatccacaattttaaaagaaaaggggggattggggggtacagtgcaggggaaagaatagtagacataatagcaacagacatacaaactaaag

SEQ ID NO: 17853 - DNA, 301 bp, Artificial Sequence
  Kmt2c.4_NTC.37
  crRNA array
  misc_feature (148)..(157): n is a, c, g, or t
cttggctttatatatcttgtggaaaggacgaaacaccgtaatttctactaagtgtagatctgaggcacatggaagcgattaatttctactaagtgtagattttgcgttgacgcgattacttaatttctactaagtgtagatttttttnnnnnnnnnnaagcttggcgtggatccgatatcaactagatcttgagacaaatggcagtattcatccacaattttaaaagaaaaggggggattggggggtacagtgcaggggaaagaatagtagacataatagcaacagacatacaaactaaag

SEQ ID NO: 17854 - DNA, 301 bp, Artificial Sequence
  Kmt2c.4_NTC.38
  crRNA array
  misc_feature (148)..(157): n is a, c, g, or t
cttggctttatatatcttgtggaaaggacgaaacaccgtaatttctactaagtgtagatctgaggcacatggaagcgattaatttctactaagtgtagataacggagcgcgatactaccataatttctactaagtgtagatttttttnnnnnnnnnnaagcttggcgtggatccgatatcaactagatcttgagacaaatggcagtattcatccacaattttaaaagaaaaggggggattggggggtacagtgcaggggaaagaatagtagacataatagcaacagacatacaaactaaag

SEQ ID NO: 17855 - DNA, 301 bp, Artificial Sequence
  Kmt2c.4_NTC.39
  crRNA array
  misc_feature (148)..(157): n is a, c, g, or t
cttggctttatatatcttgtggaaaggacgaaacaccgtaatttctactaagtgtagatctgaggcacatggaagcgattaatttctactaagtgtagatccggacgttataacgtttcttaatttctactaagtgtagatttttttnnnnnnnnnnaagcttggcgtggatccgatatcaactagatcttgagacaaatggcagtattcatccacaattttaaaagaaaaggggggattggggggtacagtgcaggggaaagaatagtagacataatagcaacagacatacaaactaaag

SEQ ID NO: 17856 - DNA, 301 bp, Artificial Sequence
  Kmt2c.4_NTC.4
  crRNA array
  misc_feature (148)..(157): n is a, c, g, or t
cttggctttatatatcttgtggaaaggacgaaacaccgtaatttctactaagtgtagatctgaggcacatggaagcgattaatttctactaagtgtagatatacccgtcgcgaacgtgagtaatttctactaagtgtagatttttttnnnnnnnnnnaagcttggcgtggatccgatatcaactagatcttgagacaaatggcagtattcatccacaattttaaaagaaaaggggggattggggggtacagtgcaggggaaagaatagtagacataatagcaacagacatacaaactaaag

SEQ ID NO: 17857 - DNA, 301 bp, Artificial Sequence
  Kmt2c.4_NTC.40
  crRNA array
  misc_feature (148)..(157): n is a, c, g, or t
cttggctttatatatcttgtggaaaggacgaaacaccgtaatttctactaagtgtagatctgaggcacatggaagcgattaatttctactaagtgtagatattcgcgaacccggccggaataatttctactaagtgtagatttttttnnnnnnnnnnaagcttggcgtggatccgatatcaactagatcttgagacaaatggcagtattcatccacaattttaaaagaaaaggggggattggggggtacagtgcaggggaaagaatagtagacataatagcaacagacatacaaactaaag

SEQ ID NO: 17858 - DNA, 301 bp, Artificial Sequence
  Kmt2c.4_NTC.41
  crRNA array
  misc_feature (148)..(157): n is a, c, g, or t
cttggctttatatatcttgtggaaaggacgaaacaccgtaatttctactaagtgtagatctgaggcacatggaagcgattaatttctactaagtgtagatttgatggcgcgacgcgttattaatttctactaagtgtagatttttttnnnnnnnnnnaagcttggcgtggatccgatatcaactagatcttgagacaaatggcagtattcatccacaattttaaaagaaaaggggggattggggggtacagtgcaggggaaagaatagtagacataatagcaacagacatacaaactaaag

SEQ ID NO: 17859 - DNA, 301 bp, Artificial Sequence
  Kmt2c.4_NTC.42
  crRNA array
  misc_feature (148)..(157): n is a, c, g, or t
cttggctttatatatcttgtggaaaggacgaaacaccgtaatttctactaagtgtagatctgaggcacatggaagcgattaatttctactaagtgtagatggtcaaatcgcggcgataactaatttctactaagtgtagatttttttnnnnnnnnnnaagcttggcgtggatccgatatcaactagatcttgagacaaatggcagtattcatccacaattttaaaagaaaaggggggattggggggtacagtgcaggggaaagaatagtagacataatagcaacagacatacaaactaaag

SEQ ID NO: 17860 - DNA, 301 bp, Artificial Sequence
  Kmt2c.4_NTC.43
  crRNA array
  misc_feature (148)..(157): n is a, c, g, or t
cttggctttatatatcttgtggaaaggacgaaacaccgtaatttctactaagtgtagatctgaggcacatggaagcgattaatttctactaagtgtagatcgactcgcgcattgaactggtaatttctactaagtgtagatttttttnnnnnnnnnnaagcttggcgtggatccgatatcaactagatcttgagacaaatggcagtattcatccacaattttaaaagaaaaggggggattggggggtacagtgcaggggaaagaatagtagacataatagcaacagacatacaaactaaag

SEQ ID NO: 17861 - DNA, 301 bp, Artificial Sequence
  Kmt2c.4_NTC.44
  crRNA array
  misc_feature (148)..(157): n is a, c, g, or t
cttggctttatatatcttgtggaaaggacgaaacaccgtaatttctactaagtgtagatctgaggcacatggaagcgattaatttctactaagtgtagatagcgtcgtacgatttatcgttaatttctactaagtgtagatttttttnnnnnnnnnnaagcttggcgtggatccgatatcaactagatcttgagacaaatggcagtattcatccacaattttaaaagaaaaggggggattggggggtacagtgcaggggaaagaatagtagacataatagcaacagacatacaaactaaag

SEQ ID NO: 17862 - DNA, 301 bp, Artificial Sequence
  Kmt2c.4_NTC.45
  crRNA array
  misc_feature (148)..(157): n is a, c, g, or t
cttggctttatatatcttgtggaaaggacgaaacaccgtaatttctactaagtgtagatctgaggcacatggaagcgattaatttctactaagtgtagatcggaacgcgtgatactagggtaatttctactaagtgtagatttttttnnnnnnnnnnaagcttggcgtggatccgatatcaactagatcttgagacaaatggcagtattcatccacaattttaaaagaaaaggggggattggggggtacagtgcaggggaaagaatagtagacataatagcaacagacatacaaactaaag

SEQ ID NO: 17863 - DNA, 301 bp, Artificial Sequence
  Kmt2c.4_NTC.46
  crRNA array
  misc_feature (148)..(157): n is a, c, g, or t
cttggctttatatatcttgtggaaaggacgaaacaccgtaatttctactaagtgtagatctgaggcacatggaagcgattaatttctactaagtgtagatagcgggtcgtagacgcgcggtaatttctactaagtgtagatttttttnnnnnnnnnnaagcttggcgtggatccgatatcaactagatcttgagacaaatggcagtattcatccacaattttaaaagaaaaggggggattggggggtacagtgcaggggaaagaatagtagacataatagcaacagacatacaaactaaag

SEQ ID NO: 17864 - DNA, 301 bp, Artificial Sequence
  Kmt2c.4_NTC.47
  crRNA array
  misc_feature (148)..(157): n is a, c, g, or t
cttggctttatatatcttgtggaaaggacgaaacaccgtaatttctactaagtgtagatctgaggcacatggaagcgattaatttctactaagtgtagattctcgtatcgcgattgttaataatttctactaagtgtagatttttttnnnnnnnnnnaagcttggcgtggatccgatatcaactagatcttgagacaaatggcagtattcatccacaattttaaaagaaaaggggggattggggggtacagtgcaggggaaagaatagtagacataatagcaacagacatacaaactaaag

SEQ ID NO: 17865 - DNA, 301 bp, Artificial Sequence
  Kmt2c.4_NTC.48
  crRNA array
  misc_feature (148)..(157): n is a, c, g, or t
cttggctttatatatcttgtggaaaggacgaaacaccgtaatttctactaagtgtagatctgaggcacatggaagcgattaatttctactaagtgtagatcggtcgactacggctgttagtaatttctactaagtgtagatttttttnnnnnnnnnnaagcttggcgtggatccgatatcaactagatcttgagacaaatggcagtattcatccacaattttaaaagaaaaggggggattggggggtacagtgcaggggaaagaatagtagacataatagcaacagacatacaaactaaag

SEQ ID NO: 17866 - DNA, 301 bp, Artificial Sequence
  Kmt2c.4_NTC.49
  crRNA array
  misc_feature (148)..(157): n is a, c, g, or t
cttggctttatatatcttgtggaaaggacgaaacaccgtaatttctactaagtgtagatctgaggcacatggaagcgattaatttctactaagtgtagattcggggcgcgtcaactgaattaatttctactaagtgtagatttttttnnnnnnnnnnaagcttggcgtggatccgatatcaactagatcttgagacaaatggcagtattcatccacaattttaaaagaaaaggggggattggggggtacagtgcaggggaaagaatagtagacataatagcaacagacatacaaactaaag

SEQ ID NO: 17867 - DNA, 301 bp, Artificial Sequence
  Kmt2c.4_NTC.5
  crRNA array
  misc_feature (148)..(157): n is a, c, g, or t
cttggctttatatatcttgtggaaaggacgaaacaccgtaatttctactaagtgtagatctgaggcacatggaagcgattaatttctactaagtgtagatgcttacgcgtcgcgaatgtataatttctactaagtgtagatttttttnnnnnnnnnnaagcttggcgtggatccgatatcaactagatcttgagacaaatggcagtattcatccacaattttaaaagaaaaggggggattggggggtacagtgcaggggaaagaatagtagacataatagcaacagacatacaaactaaag

SEQ ID NO: 17868 - DNA, 301 bp, Artificial Sequence
  Kmt2c.4_NTC.50
  crRNA array
  misc_feature (148)..(157): n is a, c, g, or t
cttggctttatatatcttgtggaaaggacgaaacaccgtaatttctactaagtgtagatctgaggcacatggaagcgattaatttctactaagtgtagatattgccgctcgcgcaaaatctaatttctactaagtgtagatttttttnnnnnnnnnnaagcttggcgtggatccgatatcaactagatcttgagacaaatggcagtattcatccacaattttaaaagaaaaggggggattggggggtacagtgcaggggaaagaatagtagacataatagcaacagacatacaaactaaag

SEQ ID NO: 17869 - DNA, 301 bp, Artificial Sequence
  Kmt2c.4_NTC.51
  crRNA array
  misc_feature (148)..(157): n is a, c, g, or t
cttggctttatatatcttgtggaaaggacgaaacaccgtaatttctactaagtgtagatctgaggcacatggaagcgattaatttctactaagtgtagattaacgcgcaacacgccaatgtaatttctactaagtgtagatttttttnnnnnnnnnnaagcttggcgtggatccgatatcaactagatcttgagacaaatggcagtattcatccacaattttaaaagaaaaggggggattggggggtacagtgcaggggaaagaatagtagacataatagcaacagacatacaaactaaag

SEQ ID NO: 17870 - DNA, 301 bp, Artificial Sequence
  Kmt2c.4_NTC.6
  crRNA array
  misc_feature (148)..(157): n is a, c, g, or t
cttggctttatatatcttgtggaaaggacgaaacaccgtaatttctactaagtgtagatctgaggcacatggaagcgattaatttctactaagtgtagatcgaatcgcgcctacgggaattaatttctactaagtgtagatttttttnnnnnnnnnnaagcttggcgtggatccgatatcaactagatcttgagacaaatggcagtattcatccacaattttaaaagaaaaggggggattggggggtacagtgcaggggaaagaatagtagacataatagcaacagacatacaaactaaag

SEQ ID NO: 17871 - DNA, 301 bp, Artificial Sequence
  Kmt2c.4_NTC.7
  crRNA array
  misc_feature (148)..(157): n is a, c, g, or t
cttggctttatatatcttgtggaaaggacgaaacaccgtaatttctactaagtgtagatctgaggcacatggaagcgattaatttctactaagtgtagatcgccgaacggataagactattaatttctactaagtgtagatttttttnnnnnnnnnnaagcttggcgtggatccgatatcaactagatcttgagacaaatggcagtattcatccacaattttaaaagaaaaggggggattggggggtacagtgcaggggaaagaatagtagacataatagcaacagacatacaaactaaag

SEQ ID NO: 17872 - DNA, 301 bp, Artificial Sequence
  Kmt2c.4_NTC.8
  crRNA array
  misc_feature (148)..(157): n is a, c, g, or t
cttggctttatatatcttgtggaaaggacgaaacaccgtaatttctactaagtgtagatctgaggcacatggaagcgattaatttctactaagtgtagatcgaccgaggttacgctgggataatttctactaagtgtagatttttttnnnnnnnnnnaagcttggcgtggatccgatatcaactagatcttgagacaaatggcagtattcatccacaattttaaaagaaaaggggggattggggggtacagtgcaggggaaagaatagtagacataatagcaacagacatacaaactaaag

SEQ ID NO: 17873 - DNA, 301 bp, Artificial Sequence
  Kmt2c.4_NTC.9
  crRNA array
  misc_feature (148)..(157): n is a, c, g, or t
cttggctttatatatcttgtggaaaggacgaaacaccgtaatttctactaagtgtagatctgaggcacatggaagcgattaatttctactaagtgtagatatcgccgtacggctatggcataatttctactaagtgtagatttttttnnnnnnnnnnaagcttggcgtggatccgatatcaactagatcttgagacaaatggcagtattcatccacaattttaaaagaaaaggggggattggggggtacagtgcaggggaaagaatagtagacataatagcaacagacatacaaactaaag

SEQ ID NO: 17874 - DNA, 301 bp, Artificial Sequence
  Kmt2d.1_NTC.0
  crRNA array
  misc_feature (148)..(157): n is a, c, g, or t
cttggctttatatatcttgtggaaaggacgaaacaccgtaatttctactaagtgtagatactccaggccacccaggtggtaatttctactaagtgtagattatagcgtcgcgcgctaatttaatttctactaagtgtagatttttttnnnnnnnnnnaagcttggcgtggatccgatatcaactagatcttgagacaaatggcagtattcatccacaattttaaaagaaaaggggggattggggggtacagtgcaggggaaagaatagtagacataatagcaacagacatacaaactaaag

SEQ ID NO: 17875 - DNA, 301 bp, Artificial Sequence
  Kmt2d.1_NTC.1
  crRNA array
  misc_feature (148)..(157): n is a, c, g, or t
cttggctttatatatcttgtggaaaggacgaaacaccgtaatttctactaagtgtagatactccaggccacccaggtggtaatttctactaagtgtagatcgcgtaaccgttccggctcctaatttctactaagtgtagatttttttnnnnnnnnnnaagcttggcgtggatccgatatcaactagatcttgagacaaatggcagtattcatccacaattttaaaagaaaaggggggattggggggtacagtgcaggggaaagaatagtagacataatagcaacagacatacaaactaaag

SEQ ID NO: 17876 - DNA, 301 bp, Artificial Sequence
  Kmt2d.1_NTC.10
  crRNA array
  misc_feature (148)..(157): n is a, c, g, or t
cttggctttatatatcttgtggaaaggacgaaacaccgtaatttctactaagtgtagatactccaggccacccaggtggtaatttctactaagtgtagatcgctaagttcgcgcgggccgtaatttctactaagtgtagatttttttnnnnnnnnnnaagcttggcgtggatccgatatcaactagatcttgagacaaatggcagtattcatccacaattttaaaagaaaaggggggattggggggtacagtgcaggggaaagaatagtagacataatagcaacagacatacaaactaaag

SEQ ID NO: 17877 - DNA, 301 bp, Artificial Sequence
  Kmt2d.1_NTC.11
  crRNA array
  misc_feature (148)..(157): n is a, c, g, or t
cttggctttatatatcttgtggaaaggacgaaacaccgtaatttctactaagtgtagatactccaggccacccaggtggtaatttctactaagtgtagatcgttcgtcgacgaagcaatctaatttctactaagtgtagatttttttnnnnnnnnnnaagcttggcgtggatccgatatcaactagatcttgagacaaatggcagtattcatccacaattttaaaagaaaaggggggattggggggtacagtgcaggggaaagaatagtagacataatagcaacagacatacaaactaaag

SEQ ID NO: 17878 - DNA, 301 bp, Artificial Sequence
  Kmt2d.1_NTC.12
  crRNA array
  misc_feature (148)..(157): n is a, c, g, or t
cttggctttatatatcttgtggaaaggacgaaacaccgtaatttctactaagtgtagatactccaggccacccaggtggtaatttctactaagtgtagatcgccgacgattaatcaatagtaatttctactaagtgtagatttttttnnnnnnnnnnaagcttggcgtggatccgatatcaactagatcttgagacaaatggcagtattcatccacaattttaaaagaaaaggggggattggggggtacagtgcaggggaaagaatagtagacataatagcaacagacatacaaactaaag

SEQ ID NO: 17879 - DNA, 301 bp, Artificial Sequence
  Kmt2d.1_NTC.13
  crRNA array
  misc_feature (148)..(157): n is a, c, g, or t
cttggctttatatatcttgtggaaaggacgaaacaccgtaatttctactaagtgtagatactccaggccacccaggtggtaatttctactaagtgtagatgaccgttgtatcgcgatcaataatttctactaagtgtagatttttttnnnnnnnnnnaagcttggcgtggatccgatatcaactagatcttgagacaaatggcagtattcatccacaattttaaaagaaaaggggggattggggggtacagtgcaggggaaagaatagtagacataatagcaacagacatacaaactaaag

SEQ ID NO: 17880 - DNA, 301 bp, Artificial Sequence
  Kmt2d.1_NTC.14
  crRNA array
  misc_feature (148)..(157): n is a, c, g, or t
cttggctttatatatcttgtggaaaggacgaaacaccgtaatttctactaagtgtagatactccaggccacccaggtggtaatttctactaagtgtagatccgttcgtgcgatagtgttttaatttctactaagtgtagatttttttnnnnnnnnnnaagcttggcgtggatccgatatcaactagatcttgagacaaatggcagtattcatccacaattttaaaagaaaaggggggattggggggtacagtgcaggggaaagaatagtagacataatagcaacagacatacaaactaaag

SEQ ID NO: 17881 - DNA, 301 bp, Artificial Sequence
  Kmt2d.1_NTC.15
  crRNA array
  misc_feature (148)..(157): n is a, c, g, or t
cttggctttatatatcttgtggaaaggacgaaacaccgtaatttctactaagtgtagatactccaggccacccaggtggtaatttctactaagtgtagatgttgtcgtgccgcgaatttataatttctactaagtgtagatttttttnnnnnnnnnnaagcttggcgtggatccgatatcaactagatcttgagacaaatggcagtattcatccacaattttaaaagaaaaggggggattggggggtacagtgcaggggaaagaatagtagacataatagcaacagacatacaaactaaag

SEQ ID NO: 17882 - DNA, 301 bp, Artificial Sequence
  Kmt2d.1_NTC.16
  crRNA array
  misc_feature (148)..(157): n is a, c, g, or t
cttggctttatatatcttgtggaaaggacgaaacaccgtaatttctactaagtgtagatactccaggccacccaggtggtaatttctactaagtgtagatcggtacgttagacgaaaatttaatttctactaagtgtagatttttttnnnnnnnnnnaagcttggcgtggatccgatatcaactagatcttgagacaaatggcagtattcatccacaattttaaaagaaaaggggggattggggggtacagtgcaggggaaagaatagtagacataatagcaacagacatacaaactaaag

SEQ ID NO: 17883 - DNA, 301 bp, Artificial Sequence
  Kmt2d.1_NTC.17
  crRNA array
  misc_feature (148)..(157): n is a, c, g, or t
cttggctttatatatcttgtggaaaggacgaaacaccgtaatttctactaagtgtagatactccaggccacccaggtggtaatttctactaagtgtagattatcgaacgctatcgaacgttaatttctactaagtgtagatttttttnnnnnnnnnnaagcttggcgtggatccgatatcaactagatcttgagacaaatggcagtattcatccacaattttaaaagaaaaggggggattggggggtacagtgcaggggaaagaatagtagacataatagcaacagacatacaaactaaag

SEQ ID NO: 17884 - DNA, 301 bp, Artificial Sequence
  Kmt2d.1_NTC.18
  crRNA array
  misc_feature (148)..(157): n is a, c, g, or t
cttggctttatatatcttgtggaaaggacgaaacaccgtaatttctactaagtgtagatactccaggccacccaggtggtaatttctactaagtgtagattccggttacgaccggcaaaataatttctactaagtgtagatttttttnnnnnnnnnnaagcttggcgtggatccgatatcaactagatcttgagacaaatggcagtattcatccacaattttaaaagaaaaggggggattggggggtacagtgcaggggaaagaatagtagacataatagcaacagacatacaaactaaag

SEQ ID NO: 17885 - DNA, 301 bp, Artificial Sequence
  Kmt2d.1_NTC.19
  crRNA array
  misc_feature (148)..(157): n is a, c, g, or t
cttggctttatatatcttgtggaaaggacgaaacaccgtaatttctactaagtgtagatactccaggccacccaggtggtaatttctactaagtgtagatcgtcgtagaacgatacccgataatttctactaagtgtagatttttttnnnnnnnnnnaagcttggcgtggatccgatatcaactagatcttgagacaaatggcagtattcatccacaattttaaaagaaaaggggggattggggggtacagtgcaggggaaagaatagtagacataatagcaacagacatacaaactaaag

SEQ ID NO: 17886 - DNA, 301 bp, Artificial Sequence
  Kmt2d.1_NTC.2
  crRNA array
  misc_feature (148)..(157): n is a, c, g, or t
cttggctttatatatcttgtggaaaggacgaaacaccgtaatttctactaagtgtagatactccaggccacccaggtggtaatttctactaagtgtagatttatgtcgcgccgcgacccgtaatttctactaagtgtagatttttttnnnnnnnnnnaagcttggcgtggatccgatatcaactagatcttgagacaaatggcagtattcatccacaattttaaaagaaaaggggggattggggggtacagtgcaggggaaagaatagtagacataatagcaacagacatacaaactaaag

SEQ ID NO: 17887 - DNA, 301 bp, Artificial Sequence
  Kmt2d.1_NTC.20
  crRNA array
  misc_feature (148)..(157): n is a, c, g, or t
cttggctttatatatcttgtggaaaggacgaaacaccgtaatttctactaagtgtagatactccaggccacccaggtggtaatttctactaagtgtagatattccggcgcgaccagaagataatttctactaagtgtagatttttttnnnnnnnnnnaagcttggcgtggatccgatatcaactagatcttgagacaaatggcagtattcatccacaattttaaaagaaaaggggggattggggggtacagtgcaggggaaagaatagtagacataatagcaacagacatacaaactaaag

SEQ ID NO: 17888 - DNA, 301 bp, Artificial Sequence
  Kmt2d.1_NTC.21
  crRNA array
  misc_feature (148)..(157): n is a, c, g, or t
cttggctttatatatcttgtggaaaggacgaaacaccgtaatttctactaagtgtagatactccaggccacccaggtggtaatttctactaagtgtagatgtataacttcgcgcggtccgtaatttctactaagtgtagatttttttnnnnnnnnnnaagcttggcgtggatccgatatcaactagatcttgagacaaatggcagtattcatccacaattttaaaagaaaaggggggattggggggtacagtgcaggggaaagaatagtagacataatagcaacagacatacaaactaaag

SEQ ID NO: 17889 - DNA, 301 bp, Artificial Sequence
  Kmt2d.1_NTC.22
  crRNA array
  misc_feature (148)..(157): n is a, c, g, or t
cttggctttatatatcttgtggaaaggacgaaacaccgtaatttctactaagtgtagatactccaggccacccaggtggtaatttctactaagtgtagatgcgcgtcaacgtaatgtgcctaatttctactaagtgtagatttttttnnnnnnnnnnaagcttggcgtggatccgatatcaactagatcttgagacaaatggcagtattcatccacaattttaaaagaaaaggggggattggggggtacagtgcaggggaaagaatagtagacataatagcaacagacatacaaactaaag

SEQ ID NO: 17890 - DNA, 301 bp, Artificial Sequence
  Kmt2d.1_NTC.23
  crRNA array
  misc_feature (148)..(157): n is a, c, g, or t
cttggctttatatatcttgtggaaaggacgaaacaccgtaatttctactaagtgtagatactccaggccacccaggtggtaatttctactaagtgtagatacgcgctattatcgtaggtgtaatttctactaagtgtagatttttttnnnnnnnnnnaagcttggcgtggatccgatatcaactagatcttgagacaaatggcagtattcatccacaattttaaaagaaaaggggggattggggggtacagtgcaggggaaagaatagtagacataatagcaacagacatacaaactaaag

SEQ ID NO: 17891 - DNA, 301 bp, Artificial Sequence
  Kmt2d.1_NTC.24
  crRNA array
  misc_feature (148)..(157): n is a, c, g, or t
cttggctttatatatcttgtggaaaggacgaaacaccgtaatttctactaagtgtagatactccaggccacccaggtggtaatttctactaagtgtagatactatcgacgttcgtcccggtaatttctactaagtgtagatttttttnnnnnnnnnnaagcttggcgtggatccgatatcaactagatcttgagacaaatggcagtattcatccacaattttaaaagaaaaggggggattggggggtacagtgcaggggaaagaatagtagacataatagcaacagacatacaaactaaag

SEQ ID NO: 17892 - DNA, 301 bp, Artificial Sequence
  Kmt2d.1_NTC.25
  crRNA array
  misc_feature (148)..(157): n is a, c, g, or t
cttggctttatatatcttgtggaaaggacgaaacaccgtaatttctactaagtgtagatactccaggccacccaggtggtaatttctactaagtgtagattcgcgttatcgtgccgtgcgtaatttctactaagtgtagatttttttnnnnnnnnnnaagcttggcgtggatccgatatcaactagatcttgagacaaatggcagtattcatccacaattttaaaagaaaaggggggattggggggtacagtgcaggggaaagaatagtagacataatagcaacagacatacaaactaaag

SEQ ID NO: 17893 - DNA, 301 bp, Artificial Sequence
  Kmt2d.1_NTC.26
  crRNA array
  misc_feature (148)..(157): n is a, c, g, or t
cttggctttatatatcttgtggaaaggacgaaacaccgtaatttctactaagtgtagatactccaggccacccaggtggtaatttctactaagtgtagatcgcgacggcggttttaacactaatttctactaagtgtagatttttttnnnnnnnnnnaagcttggcgtggatccgatatcaactagatcttgagacaaatggcagtattcatccacaattttaaaagaaaaggggggattggggggtacagtgcaggggaaagaatagtagacataatagcaacagacatacaaactaaag

SEQ ID NO: 17894 - DNA, 301 bp, Artificial Sequence
  Kmt2d.1_NTC.27
  crRNA array
  misc_feature (148)..(157): n is a, c, g, or t
cttggctttatatatcttgtggaaaggacgaaacaccgtaatttctactaagtgtagatactccaggccacccaggtggtaatttctactaagtgtagatgtcgcgttgcgaccggcgcttaatttctactaagtgtagatttttttnnnnnnnnnnaagcttggcgtggatccgatatcaactagatcttgagacaaatggcagtattcatccacaattttaaaagaaaaggggggattggggggtacagtgcaggggaaagaatagtagacataatagcaacagacatacaaactaaag

SEQ ID NO: 17895 - DNA, 301 bp, Artificial Sequence
  Kmt2d.1_NTC.28
  crRNA array
  misc_feature (148)..(157): n is a, c, g, or t
cttggctttatatatcttgtggaaaggacgaaacaccgtaatttctactaagtgtagatactccaggccacccaggtggtaatttctactaagtgtagataccgctaatcggcgtaaacttaatttctactaagtgtagatttttttnnnnnnnnnnaagcttggcgtggatccgatatcaactagatcttgagacaaatggcagtattcatccacaattttaaaagaaaaggggggattggggggtacagtgcaggggaaagaatagtagacataatagcaacagacatacaaactaaag

SEQ ID NO: 17896 - DNA, 301 bp, Artificial Sequence
  Kmt2d.1_NTC.29
  crRNA array
  misc_feature (148)..(157): n is a, c, g, or t
cttggctttatatatcttgtggaaaggacgaaacaccgtaatttctactaagtgtagatactccaggccacccaggtggtaatttctactaagtgtagatcgcgatctataccgtctatataatttctactaagtgtagatttttttnnnnnnnnnnaagcttggcgtggatccgatatcaactagatcttgagacaaatggcagtattcatccacaattttaaaagaaaaggggggattggggggtacagtgcaggggaaagaatagtagacataatagcaacagacatacaaactaaag

SEQ ID NO: 17897 - DNA, 301 bp, Artificial Sequence
  Kmt2d.1_NTC.3
  crRNA array
  misc_feature (148)..(157): n is a, c, g, or t
cttggctttatatatcttgtggaaaggacgaaacaccgtaatttctactaagtgtagatactccaggccacccaggtggtaatttctactaagtgtagattcgacgcgagacgacgtacataatttctactaagtgtagatttttttnnnnnnnnnnaagcttggcgtggatccgatatcaactagatcttgagacaaatggcagtattcatccacaattttaaaagaaaaggggggattggggggtacagtgcaggggaaagaatagtagacataatagcaacagacatacaaactaaag

SEQ ID NO: 17898 - DNA, 301 bp, Artificial Sequence
  Kmt2d.1_NTC.30
  crRNA array
  misc_feature (148)..(157): n is a, c, g, or t
cttggctttatatatcttgtggaaaggacgaaacaccgtaatttctactaagtgtagatactccaggccacccaggtggtaatttctactaagtgtagatcgatcgtacgggtgtcctaataatttctactaagtgtagatttttttnnnnnnnnnnaagcttggcgtggatccgatatcaactagatcttgagacaaatggcagtattcatccacaattttaaaagaaaaggggggattggggggtacagtgcaggggaaagaatagtagacataatagcaacagacatacaaactaaag

SEQ ID NO: 17899 - DNA, 301 bp, Artificial Sequence
  Kmt2d.1_NTC.31
  crRNA array
  misc_feature (148)..(157): n is a, c, g, or t
cttggctttatatatcttgtggaaaggacgaaacaccgtaatttctactaagtgtagatactccaggccacccaggtggtaatttctactaagtgtagatgccgaccgcgtgattgtaggtaatttctactaagtgtagatttttttnnnnnnnnnnaagcttggcgtggatccgatatcaactagatcttgagacaaatggcagtattcatccacaattttaaaagaaaaggggggattggggggtacagtgcaggggaaagaatagtagacataatagcaacagacatacaaactaaag

SEQ ID NO: 17900 - DNA, 301 bp, Artificial Sequence
  Kmt2d.1_NTC.32
  crRNA array
  misc_feature (148)..(157): n is a, c, g, or t
cttggctttatatatcttgtggaaaggacgaaacaccgtaatttctactaagtgtagatactccaggccacccaggtggtaatttctactaagtgtagatgcacgttacgcccgggtcactaatttctactaagtgtagatttttttnnnnnnnnnnaagcttggcgtggatccgatatcaactagatcttgagacaaatggcagtattcatccacaattttaaaagaaaaggggggattggggggtacagtgcaggggaaagaatagtagacataatagcaacagacatacaaactaaag

SEQ ID NO: 17901 - DNA, 301 bp, Artificial Sequence
  Kmt2d.1_NTC.33
  crRNA array
  misc_feature (148)..(157): n is a, c, g, or t
cttggctttatatatcttgtggaaaggacgaaacaccgtaatttctactaagtgtagatactccaggccacccaggtggtaatttctactaagtgtagattaagcgaccgacgcattcgctaatttctactaagtgtagatttttttnnnnnnnnnnaagcttggcgtggatccgatatcaactagatcttgagacaaatggcagtattcatccacaattttaaaagaaaaggggggattggggggtacagtgcaggggaaagaatagtagacataatagcaacagacatacaaactaaag

SEQ ID NO: 17902 - DNA, 301 bp, Artificial Sequence
  Kmt2d.1_NTC.34
  crRNA array
  misc_feature (148)..(157): n is a, c, g, or t
cttggctttatatatcttgtggaaaggacgaaacaccgtaatttctactaagtgtagatactccaggccacccaggtggtaatttctactaagtgtagattagcgttcgacacgtgaaactaatttctactaagtgtagatttttttnnnnnnnnnnaagcttggcgtggatccgatatcaactagatcttgagacaaatggcagtattcatccacaattttaaaagaaaaggggggattggggggtacagtgcaggggaaagaatagtagacataatagcaacagacatacaaactaaag

SEQ ID NO: 17903 - DNA, 301 bp, Artificial Sequence
  Kmt2d.1_NTC.35
  crRNA array
  misc_feature (148)..(157): n is a, c, g, or t
cttggctttatatatcttgtggaaaggacgaaacaccgtaatttctactaagtgtagatactccaggccacccaggtggtaatttctactaagtgtagattggcgcgtaatcgctattcgtaatttctactaagtgtagatttttttnnnnnnnnnnaagcttggcgtggatccgatatcaactagatcttgagacaaatggcagtattcatccacaattttaaaagaaaaggggggattggggggtacagtgcaggggaaagaatagtagacataatagcaacagacatacaaactaaag

SEQ ID NO: 17904 - DNA, 301 bp, Artificial Sequence
  Kmt2d.1_NTC.36
  crRNA array
  misc_feature (148)..(157): n is a, c, g, or t
cttggctttatatatcttgtggaaaggacgaaacaccgtaatttctactaagtgtagatactccaggccacccaggtggtaatttctactaagtgtagatcaacccgccgtagcgggccttaatttctactaagtgtagatttttttnnnnnnnnnnaagcttggcgtggatccgatatcaactagatcttgagacaaatggcagtattcatccacaattttaaaagaaaaggggggattggggggtacagtgcaggggaaagaatagtagacataatagcaacagacatacaaactaaag

SEQ ID NO: 17905 - DNA, 301 bp, Artificial Sequence
  Kmt2d.1_NTC.37
  crRNA array
  misc_feature (148)..(157): n is a, c, g, or t
cttggctttatatatcttgtggaaaggacgaaacaccgtaatttctactaagtgtagatactccaggccacccaggtggtaatttctactaagtgtagattttgcgttgacgcgattacttaatttctactaagtgtagatttttttnnnnnnnnnnaagcttggcgtggatccgatatcaactagatcttgagacaaatggcagtattcatccacaattttaaaagaaaaggggggattggggggtacagtgcaggggaaagaatagtagacataatagcaacagacatacaaactaaag

SEQ ID NO: 17906 - DNA, 301 bp, Artificial Sequence
  Kmt2d.1_NTC.38
  crRNA array
  misc_feature (148)..(157): n is a, c, g, or t
cttggctttatatatcttgtggaaaggacgaaacaccgtaatttctactaagtgtagatactccaggccacccaggtggtaatttctactaagtgtagataacggagcgcgatactaccataatttctactaagtgtagatttttttnnnnnnnnnnaagcttggcgtggatccgatatcaactagatcttgagacaaatggcagtattcatccacaattttaaaagaaaaggggggattggggggtacagtgcaggggaaagaatagtagacataatagcaacagacatacaaactaaag

SEQ ID NO: 17907 - DNA, 301 bp, Artificial Sequence
  Kmt2d.1_NTC.39
  crRNA array
  misc_feature (148)..(157): n is a, c, g, or t
cttggctttatatatcttgtggaaaggacgaaacaccgtaatttctactaagtgtagatactccaggccacccaggtggtaatttctactaagtgtagatccggacgttataacgtttcttaatttctactaagtgtagatttttttnnnnnnnnnnaagcttggcgtggatccgatatcaactagatcttgagacaaatggcagtattcatccacaattttaaaagaaaaggggggattggggggtacagtgcaggggaaagaatagtagacataatagcaacagacatacaaactaaag

SEQ ID NO: 17908 - DNA, 301 bp, Artificial Sequence
  Kmt2d.1_NTC.4
  crRNA array
  misc_feature (148)..(157): n is a, c, g, or t
cttggctttatatatcttgtggaaaggacgaaacaccgtaatttctactaagtgtagatactccaggccacccaggtggtaatttctactaagtgtagatatacccgtcgcgaacgtgagtaatttctactaagtgtagatttttttnnnnnnnnnnaagcttggcgtggatccgatatcaactagatcttgagacaaatggcagtattcatccacaattttaaaagaaaaggggggattggggggtacagtgcaggggaaagaatagtagacataatagcaacagacatacaaactaaag

SEQ ID NO: 17909 - DNA, 301 bp, Artificial Sequence
  Kmt2d.1_NTC.40
  crRNA array
  misc_feature (148)..(157): n is a, c, g, or t
cttggctttatatatcttgtggaaaggacgaaacaccgtaatttctactaagtgtagatactccaggccacccaggtggtaatttctactaagtgtagatattcgcgaacccggccggaataatttctactaagtgtagatttttttnnnnnnnnnnaagcttggcgtggatccgatatcaactagatcttgagacaaatggcagtattcatccacaattttaaaagaaaaggggggattggggggtacagtgcaggggaaagaatagtagacataatagcaacagacatacaaactaaag

SEQ ID NO: 17910 - DNA, 301 bp, Artificial Sequence
  Kmt2d.1_NTC.41
  crRNA array
  misc_feature (148)..(157): n is a, c, g, or t
cttggctttatatatcttgtggaaaggacgaaacaccgtaatttctactaagtgtagatactccaggccacccaggtggtaatttctactaagtgtagatttgatggcgcgacgcgttattaatttctactaagtgtagatttttttnnnnnnnnnnaagcttggcgtggatccgatatcaactagatcttgagacaaatggcagtattcatccacaattttaaaagaaaaggggggattggggggtacagtgcaggggaaagaatagtagacataatagcaacagacatacaaactaaag

SEQ ID NO: 17911 - DNA, 301 bp, Artificial Sequence
  Kmt2d.1_NTC.42
  crRNA array
  misc_feature (148)..(157): n is a, c, g, or t
cttggctttatatatcttgtggaaaggacgaaacaccgtaatttctactaagtgtagatactccaggccacccaggtggtaatttctactaagtgtagatggtcaaatcgcggcgataactaatttctactaagtgtagatttttttnnnnnnnnnnaagcttggcgtggatccgatatcaactagatcttgagacaaatggcagtattcatccacaattttaaaagaaaaggggggattggggggtacagtgcaggggaaagaatagtagacataatagcaacagacatacaaactaaag

SEQ ID NO: 17912 - DNA, 301 bp, Artificial Sequence
  Kmt2d.1_NTC.43
  crRNA array
  misc_feature (148)..(157): n is a, c, g, or t
cttggctttatatatcttgtggaaaggacgaaacaccgtaatttctactaagtgtagatactccaggccacccaggtggtaatttctactaagtgtagatcgactcgcgcattgaactggtaatttctactaagtgtagatttttttnnnnnnnnnnaagcttggcgtggatccgatatcaactagatcttgagacaaatggcagtattcatccacaattttaaaagaaaaggggggattggggggtacagtgcaggggaaagaatagtagacataatagcaacagacatacaaactaaag

SEQ ID NO: 17913 - DNA, 111 bp, Artificial Sequence
  Kmt2d.1_NTC.44
  crRNA array
tgagacaaatggcagtattcatccacaattttaaaagaaaaggggggattggggggtacagtgcaggggaaagaatagtagacataatagcaacagacatacaaactaaag

SEQ ID NO: 17914 - DNA, 301 bp, Artificial Sequence
  Kmt2d.1_NTC.45
  crRNA array
  misc_feature (148)..(157): n is a, c, g, or t
cttggctttatatatcttgtggaaaggacgaaacaccgtaatttctactaagtgtagatactccaggccacccaggtggtaatttctactaagtgtagatcggaacgcgtgatactagggtaatttctactaagtgtagatttttttnnnnnnnnnnaagcttggcgtggatccgatatcaactagatcttgagacaaatggcagtattcatccacaattttaaaagaaaaggggggattggggggtacagtgcaggggaaagaatagtagacataatagcaacagacatacaaactaaag

SEQ ID NO: 17915 - DNA, 301 bp, Artificial Sequence
  Kmt2d.1_NTC.46
  crRNA array
  misc_feature (148)..(157): n is a, c, g, or t
cttggctttatatatcttgtggaaaggacgaaacaccgtaatttctactaagtgtagatactccaggccacccaggtggtaatttctactaagtgtagatagcgggtcgtagacgcgcggtaatttctactaagtgtagatttttttnnnnnnnnnnaagcttggcgtggatccgatatcaactagatcttgagacaaatggcagtattcatccacaattttaaaagaaaaggggggattggggggtacagtgcaggggaaagaatagtagacataatagcaacagacatacaaactaaag

SEQ ID NO: 17916 - DNA, 301 bp, Artificial Sequence
  Kmt2d.1_NTC.47
  crRNA array
  misc_feature (148)..(157): n is a, c, g, or t
cttggctttatatatcttgtggaaaggacgaaacaccgtaatttctactaagtgtagatactccaggccacccaggtggtaatttctactaagtgtagattctcgtatcgcgattgttaataatttctactaagtgtagatttttttnnnnnnnnnnaagcttggcgtggatccgatatcaactagatcttgagacaaatggcagtattcatccacaattttaaaagaaaaggggggattggggggtacagtgcaggggaaagaatagtagacataatagcaacagacatacaaactaaag

SEQ ID NO: 17917 - DNA, 301 bp, Artificial Sequence
  Kmt2d.1_NTC.48
  crRNA array
  misc_feature (148)..(157): n is a, c, g, or t
cttggctttatatatcttgtggaaaggacgaaacaccgtaatttctactaagtgtagatactccaggccacccaggtggtaatttctactaagtgtagatcggtcgactacggctgttagtaatttctactaagtgtagatttttttnnnnnnnnnnaagcttggcgtggatccgatatcaactagatcttgagacaaatggcagtattcatccacaattttaaaagaaaaggggggattggggggtacagtgcaggggaaagaatagtagacataatagcaacagacatacaaactaaag

SEQ ID NO: 17918 - DNA, 301 bp, Artificial Sequence
  Kmt2d.1_NTC.49
  crRNA array
  misc_feature (148)..(157): n is a, c, g, or t
cttggctttatatatcttgtggaaaggacgaaacaccgtaatttctactaagtgtagatactccaggccacccaggtggtaatttctactaagtgtagattcggggcgcgtcaactgaattaatttctactaagtgtagatttttttnnnnnnnnnnaagcttggcgtggatccgatatcaactagatcttgagacaaatggcagtattcatccacaattttaaaagaaaaggggggattggggggtacagtgcaggggaaagaatagtagacataatagcaacagacatacaaactaaag

SEQ ID NO: 17919 - DNA, 301 bp, Artificial Sequence
  Kmt2d.1_NTC.5
  crRNA array
  misc_feature (148)..(157): n is a, c, g, or t
cttggctttatatatcttgtggaaaggacgaaacaccgtaatttctactaagtgtagatactccaggccacccaggtggtaatttctactaagtgtagatgcttacgcgtcgcgaatgtataatttctactaagtgtagatttttttnnnnnnnnnnaagcttggcgtggatccgatatcaactagatcttgagacaaatggcagtattcatccacaattttaaaagaaaaggggggattggggggtacagtgcaggggaaagaatagtagacataatagcaacagacatacaaactaaag

SEQ ID NO: 17920 - DNA, 301 bp, Artificial Sequence
  Kmt2d.1_NTC.50
  crRNA array
  misc_feature (148)..(157): n is a, c, g, or t
cttggctttatatatcttgtggaaaggacgaaacaccgtaatttctactaagtgtagatactccaggccacccaggtggtaatttctactaagtgtagatattgccgctcgcgcaaaatctaatttctactaagtgtagatttttttnnnnnnnnnnaagcttggcgtggatccgatatcaactagatcttgagacaaatggcagtattcatccacaattttaaaagaaaaggggggattggggggtacagtgcaggggaaagaatagtagacataatagcaacagacatacaaactaaag

SEQ ID NO: 17921 - DNA, 301 bp, Artificial Sequence
  Kmt2d.1_NTC.51
  crRNA array
  misc_feature (148)..(157): n is a, c, g, or t
cttggctttatatatcttgtggaaaggacgaaacaccgtaatttctactaagtgtagatactccaggccacccaggtggtaatttctactaagtgtagattaacgcgcaacacgccaatgtaatttctactaagtgtagatttttttnnnnnnnnnnaagcttggcgtggatccgatatcaactagatcttgagacaaatggcagtattcatccacaattttaaaagaaaaggggggattggggggtacagtgcaggggaaagaatagtagacataatagcaacagacatacaaactaaag

SEQ ID NO: 17922 - DNA, 301 bp, Artificial Sequence
  Kmt2d.1_NTC.6
  crRNA array
  misc_feature (148)..(157): n is a, c, g, or t
cttggctttatatatcttgtggaaaggacgaaacaccgtaatttctactaagtgtagatactccaggccacccaggtggtaatttctactaagtgtagatcgaatcgcgcctacgggaattaatttctactaagtgtagatttttttnnnnnnnnnnaagcttggcgtggatccgatatcaactagatcttgagacaaatggcagtattcatccacaattttaaaagaaaaggggggattggggggtacagtgcaggggaaagaatagtagacataatagcaacagacatacaaactaaag

SEQ ID NO: 17923 - DNA, 301 bp, Artificial Sequence
  Kmt2d.1_NTC.7
  crRNA array
  misc_feature (148)..(157): n is a, c, g, or t
cttggctttatatatcttgtggaaaggacgaaacaccgtaatttctactaagtgtagatactccaggccacccaggtggtaatttctactaagtgtagatcgccgaacggataagactattaatttctactaagtgtagatttttttnnnnnnnnnnaagcttggcgtggatccgatatcaactagatcttgagacaaatggcagtattcatccacaattttaaaagaaaaggggggattggggggtacagtgcaggggaaagaatagtagacataatagcaacagacatacaaactaaag

SEQ ID NO: 17924 - DNA, 301 bp, Artificial Sequence
  Kmt2d.1_NTC.8
  crRNA array
  misc_feature (148)..(157): n is a, c, g, or t
cttggctttatatatcttgtggaaaggacgaaacaccgtaatttctactaagtgtagatactccaggccacccaggtggtaatttctactaagtgtagatcgaccgaggttacgctgggataatttctactaagtgtagatttttttnnnnnnnnnnaagcttggcgtggatccgatatcaactagatcttgagacaaatggcagtattcatccacaattttaaaagaaaaggggggattggggggtacagtgcaggggaaagaatagtagacataatagcaacagacatacaaactaaag

SEQ ID NO: 17925 - DNA, 301 bp, Artificial Sequence
  Kmt2d.1_NTC.9
  crRNA array
  misc_feature (148)..(157): n is a, c, g, or t
cttggctttatatatcttgtggaaaggacgaaacaccgtaatttctactaagtgtagatactccaggccacccaggtggtaatttctactaagtgtagatatcgccgtacggctatggcataatttctactaagtgtagatttttttnnnnnnnnnnaagcttggcgtggatccgatatcaactagatcttgagacaaatggcagtattcatccacaattttaaaagaaaaggggggattggggggtacagtgcaggggaaagaatagtagacataatagcaacagacatacaaactaaag

SEQ ID NO: 17926 - DNA, 301 bp, Artificial Sequence
  Kmt2d.2_NTC.0
  crRNA array
  misc_feature (148)..(157): n is a, c, g, or t
cttggctttatatatcttgtggaaaggacgaaacaccgtaatttctactaagtgtagatggggaccatagccaggagagtaatttctactaagtgtagattatagcgtcgcgcgctaatttaatttctactaagtgtagatttttttnnnnnnnnnnaagcttggcgtggatccgatatcaactagatcttgagacaaatggcagtattcatccacaattttaaaagaaaaggggggattggggggtacagtgcaggggaaagaatagtagacataatagcaacagacatacaaactaaag

SEQ ID NO: 17927 - DNA, 301 bp, Artificial Sequence
  Kmt2d.2_NTC.1
  crRNA array
  misc_feature (148)..(157): n is a, c, g, or t
cttggctttatatatcttgtggaaaggacgaaacaccgtaatttctactaagtgtagatggggaccatagccaggagagtaatttctactaagtgtagatcgcgtaaccgttccggctcctaatttctactaagtgtagatttttttnnnnnnnnnnaagcttggcgtggatccgatatcaactagatcttgagacaaatggcagtattcatccacaattttaaaagaaaaggggggattggggggtacagtgcaggggaaagaatagtagacataatagcaacagacatacaaactaaag

SEQ ID NO: 17928 - DNA, 301 bp, Artificial Sequence
  Kmt2d.2_NTC.10
  crRNA array
  misc_feature (148)..(157): n is a, c, g, or t
cttggctttatatatcttgtggaaaggacgaaacaccgtaatttctactaagtgtagatggggaccatagccaggagagtaatttctactaagtgtagatcgctaagttcgcgcgggccgtaatttctactaagtgtagatttttttnnnnnnnnnnaagcttggcgtggatccgatatcaactagatcttgagacaaatggcagtattcatccacaattttaaaagaaaaggggggattggggggtacagtgcaggggaaagaatagtagacataatagcaacagacatacaaactaaag

SEQ ID NO: 17929 - DNA, 301 bp, Artificial Sequence
  Kmt2d.2_NTC.11
  crRNA array
  misc_feature (148)..(157): n is a, c, g, or t
cttggctttatatatcttgtggaaaggacgaaacaccgtaatttctactaagtgtagatggggaccatagccaggagagtaatttctactaagtgtagatcgttcgtcgacgaagcaatctaatttctactaagtgtagatttttttnnnnnnnnnnaagcttggcgtggatccgatatcaactagatcttgagacaaatggcagtattcatccacaattttaaaagaaaaggggggattggggggtacagtgcaggggaaagaatagtagacataatagcaacagacatacaaactaaag

SEQ ID NO: 17930 - DNA, 301 bp, Artificial Sequence
  Kmt2d.2_NTC.12
  crRNA array
  misc_feature (148)..(157): n is a, c, g, or t
cttggctttatatatcttgtggaaaggacgaaacaccgtaatttctactaagtgtagatggggaccatagccaggagagtaatttctactaagtgtagatcgccgacgattaatcaatagtaatttctactaagtgtagatttttttnnnnnnnnnnaagcttggcgtggatccgatatcaactagatcttgagacaaatggcagtattcatccacaattttaaaagaaaaggggggattggggggtacagtgcaggggaaagaatagtagacataatagcaacagacatacaaactaaag

SEQ ID NO: 17931 - DNA, 301 bp, Artificial Sequence
  Kmt2d.2_NTC.13
  crRNA array
  misc_feature (148)..(157): n is a, c, g, or t
cttggctttatatatcttgtggaaaggacgaaacaccgtaatttctactaagtgtagatggggaccatagccaggagagtaatttctactaagtgtagatgaccgttgtatcgcgatcaataatttctactaagtgtagatttttttnnnnnnnnnnaagcttggcgtggatccgatatcaactagatcttgagacaaatggcagtattcatccacaattttaaaagaaaaggggggattggggggtacagtgcaggggaaagaatagtagacataatagcaacagacatacaaactaaag

SEQ ID NO: 17932 - DNA, 301 bp, Artificial Sequence
  Kmt2d.2_NTC.14
  crRNA array
  misc_feature (148)..(157): n is a, c, g, or t
cttggctttatatatcttgtggaaaggacgaaacaccgtaatttctactaagtgtagatggggaccatagccaggagagtaatttctactaagtgtagatccgttcgtgcgatagtgttttaatttctactaagtgtagatttttttnnnnnnnnnnaagcttggcgtggatccgatatcaactagatcttgagacaaatggcagtattcatccacaattttaaaagaaaaggggggattggggggtacagtgcaggggaaagaatagtagacataatagcaacagacatacaaactaaag

SEQ ID NO: 17933 - DNA, 301 bp, Artificial Sequence
  Kmt2d.2_NTC.15
  crRNA array
  misc_feature (148)..(157): n is a, c, g, or t
cttggctttatatatcttgtggaaaggacgaaacaccgtaatttctactaagtgtagatggggaccatagccaggagagtaatttctactaagtgtagatgttgtcgtgccgcgaatttataatttctactaagtgtagatttttttnnnnnnnnnnaagcttggcgtggatccgatatcaactagatcttgagacaaatggcagtattcatccacaattttaaaagaaaaggggggattggggggtacagtgcaggggaaagaatagtagacataatagcaacagacatacaaactaaag

SEQ ID NO: 17934 - DNA, 301 bp, Artificial Sequence
  Kmt2d.2_NTC.16
  crRNA array
  misc_feature (148)..(157): n is a, c, g, or t
cttggctttatatatcttgtggaaaggacgaaacaccgtaatttctactaagtgtagatggggaccatagccaggagagtaatttctactaagtgtagatcggtacgttagacgaaaatttaatttctactaagtgtagatttttttnnnnnnnnnnaagcttggcgtggatccgatatcaactagatcttgagacaaatggcagtattcatccacaattttaaaagaaaaggggggattggggggtacagtgcaggggaaagaatagtagacataatagcaacagacatacaaactaaag

SEQ ID NO: 17935 - DNA, 301 bp, Artificial Sequence
  Kmt2d.2_NTC.17
  crRNA array
  misc_feature (148)..(157): n is a, c, g, or t
cttggctttatatatcttgtggaaaggacgaaacaccgtaatttctactaagtgtagatggggaccatagccaggagagtaatttctactaagtgtagattatcgaacgctatcgaacgttaatttctactaagtgtagatttttttnnnnnnnnnnaagcttggcgtggatccgatatcaactagatcttgagacaaatggcagtattcatccacaattttaaaagaaaaggggggattggggggtacagtgcaggggaaagaatagtagacataatagcaacagacatacaaactaaag

SEQ ID NO: 17936 - DNA, 301 bp, Artificial Sequence
  Kmt2d.2_NTC.18
  crRNA array
  misc_feature (148)..(157): n is a, c, g, or t
cttggctttatatatcttgtggaaaggacgaaacaccgtaatttctactaagtgtagatggggaccatagccaggagagtaatttctactaagtgtagattccggttacgaccggcaaaataatttctactaagtgtagatttttttnnnnnnnnnnaagcttggcgtggatccgatatcaactagatcttgagacaaatggcagtattcatccacaattttaaaagaaaaggggggattggggggtacagtgcaggggaaagaatagtagacataatagcaacagacatacaaactaaag

SEQ ID NO: 17937 - DNA, 301 bp, Artificial Sequence
  Kmt2d.2_NTC.19
  crRNA array
  misc_feature (148)..(157): n is a, c, g, or t
cttggctttatatatcttgtggaaaggacgaaacaccgtaatttctactaagtgtagatggggaccatagccaggagagtaatttctactaagtgtagatcgtcgtagaacgatacccgataatttctactaagtgtagatttttttnnnnnnnnnnaagcttggcgtggatccgatatcaactagatcttgagacaaatggcagtattcatccacaattttaaaagaaaaggggggattggggggtacagtgcaggggaaagaatagtagacataatagcaacagacatacaaactaaag

SEQ ID NO: 17938 - DNA, 301 bp, Artificial Sequence
  Kmt2d.2_NTC.2
  crRNA array
  misc_feature (148)..(157): n is a, c, g, or t
cttggctttatatatcttgtggaaaggacgaaacaccgtaatttctactaagtgtagatggggaccatagccaggagagtaatttctactaagtgtagatttatgtcgcgccgcgacccgtaatttctactaagtgtagatttttttnnnnnnnnnnaagcttggcgtggatccgatatcaactagatcttgagacaaatggcagtattcatccacaattttaaaagaaaaggggggattggggggtacagtgcaggggaaagaatagtagacataatagcaacagacatacaaactaaag

SEQ ID NO: 17939 - DNA, 301 bp, Artificial Sequence
  Kmt2d.2_NTC.20
  crRNA array
  misc_feature (148)..(157): n is a, c, g, or t
cttggctttatatatcttgtggaaaggacgaaacaccgtaatttctactaagtgtagatggggaccatagccaggagagtaatttctactaagtgtagatattccggcgcgaccagaagataatttctactaagtgtagatttttttnnnnnnnnnnaagcttggcgtggatccgatatcaactagatcttgagacaaatggcagtattcatccacaattttaaaagaaaaggggggattggggggtacagtgcaggggaaagaatagtagacataatagcaacagacatacaaactaaag

SEQ ID NO: 17940 - DNA, 301 bp, Artificial Sequence
  Kmt2d.2_NTC.21
  crRNA array
  misc_feature (148)..(157): n is a, c, g, or t
cttggctttatatatcttgtggaaaggacgaaacaccgtaatttctactaagtgtagatggggaccatagccaggagagtaatttctactaagtgtagatgtataacttcgcgcggtccgtaatttctactaagtgtagatttttttnnnnnnnnnnaagcttggcgtggatccgatatcaactagatcttgagacaaatggcagtattcatccacaattttaaaagaaaaggggggattggggggtacagtgcaggggaaagaatagtagacataatagcaacagacatacaaactaaag

SEQ ID NO: 17941 - DNA, 301 bp, Artificial Sequence
  Kmt2d.2_NTC.22
  crRNA array
  misc_feature (148)..(157): n is a, c, g, or t
cttggctttatatatcttgtggaaaggacgaaacaccgtaatttctactaagtgtagatggggaccatagccaggagagtaatttctactaagtgtagatgcgcgtcaacgtaatgtgcctaatttctactaagtgtagatttttttnnnnnnnnnnaagcttggcgtggatccgatatcaactagatcttgagacaaatggcagtattcatccacaattttaaaagaaaaggggggattggggggtacagtgcaggggaaagaatagtagacataatagcaacagacatacaaactaaag

SEQ ID NO: 17942 - DNA, 301 bp, Artificial Sequence
  Kmt2d.2_NTC.23
  crRNA array
  misc_feature (148)..(157): n is a, c, g, or t
cttggctttatatatcttgtggaaaggacgaaacaccgtaatttctactaagtgtagatggggaccatagccaggagagtaatttctactaagtgtagatacgcgctattatcgtaggtgtaatttctactaagtgtagatttttttnnnnnnnnnnaagcttggcgtggatccgatatcaactagatcttgagacaaatggcagtattcatccacaattttaaaagaaaaggggggattggggggtacagtgcaggggaaagaatagtagacataatagcaacagacatacaaactaaag

SEQ ID NO: 17943 - DNA, 301 bp, Artificial Sequence
  Kmt2d.2_NTC.24
  crRNA array
  misc_feature (148)..(157): n is a, c, g, or t
cttggctttatatatcttgtggaaaggacgaaacaccgtaatttctactaagtgtagatggggaccatagccaggagagtaatttctactaagtgtagatactatcgacgttcgtcccggtaatttctactaagtgtagatttttttnnnnnnnnnnaagcttggcgtggatccgatatcaactagatcttgagacaaatggcagtattcatccacaattttaaaagaaaaggggggattggggggtacagtgcaggggaaagaatagtagacataatagcaacagacatacaaactaaag

SEQ ID NO: 17944 - DNA, 301 bp, Artificial Sequence
  Kmt2d.2_NTC.25
  crRNA array
  misc_feature (148)..(157): n is a, c, g, or t
cttggctttatatatcttgtggaaaggacgaaacaccgtaatttctactaagtgtagatggggaccatagccaggagagtaatttctactaagtgtagattcgcgttatcgtgccgtgcgtaatttctactaagtgtagatttttttnnnnnnnnnnaagcttggcgtggatccgatatcaactagatcttgagacaaatggcagtattcatccacaattttaaaagaaaaggggggattggggggtacagtgcaggggaaagaatagtagacataatagcaacagacatacaaactaaag

SEQ ID NO: 17945 - DNA, 301 bp, Artificial Sequence
  Kmt2d.2_NTC.26
  crRNA array
  misc_feature (148)..(157): n is a, c, g, or t
cttggctttatatatcttgtggaaaggacgaaacaccgtaatttctactaagtgtagatggggaccatagccaggagagtaatttctactaagtgtagatcgcgacggcggttttaacactaatttctactaagtgtagatttttttnnnnnnnnnnaagcttggcgtggatccgatatcaactagatcttgagacaaatggcagtattcatccacaattttaaaagaaaaggggggattggggggtacagtgcaggggaaagaatagtagacataatagcaacagacatacaaactaaag

SEQ ID NO: 17946 - DNA, 301 bp, Artificial Sequence
  Kmt2d.2_NTC.27
  crRNA array
  misc_feature (148)..(157): n is a, c, g, or t
cttggctttatatatcttgtggaaaggacgaaacaccgtaatttctactaagtgtagatggggaccatagccaggagagtaatttctactaagtgtagatgtcgcgttgcgaccggcgcttaatttctactaagtgtagatttttttnnnnnnnnnnaagcttggcgtggatccgatatcaactagatcttgagacaaatggcagtattcatccacaattttaaaagaaaaggggggattggggggtacagtgcaggggaaagaatagtagacataatagcaacagacatacaaactaaag

SEQ ID NO: 17947 - DNA, 301 bp, Artificial Sequence
  Kmt2d.2_NTC.28
  crRNA array
  misc_feature (148)..(157): n is a, c, g, or t
cttggctttatatatcttgtggaaaggacgaaacaccgtaatttctactaagtgtagatggggaccatagccaggagagtaatttctactaagtgtagataccgctaatcggcgtaaacttaatttctactaagtgtagatttttttnnnnnnnnnnaagcttggcgtggatccgatatcaactagatcttgagacaaatggcagtattcatccacaattttaaaagaaaaggggggattggggggtacagtgcaggggaaagaatagtagacataatagcaacagacatacaaactaaag

SEQ ID NO: 17948 - DNA, 301 bp, Artificial Sequence
  Kmt2d.2_NTC.29
  crRNA array
  misc_feature (148)..(157): n is a, c, g, or t
cttggctttatatatcttgtggaaaggacgaaacaccgtaatttctactaagtgtagatggggaccatagccaggagagtaatttctactaagtgtagatcgcgatctataccgtctatataatttctactaagtgtagatttttttnnnnnnnnnnaagcttggcgtggatccgatatcaactagatcttgagacaaatggcagtattcatccacaattttaaaagaaaaggggggattggggggtacagtgcaggggaaagaatagtagacataatagcaacagacatacaaactaaag

SEQ ID NO: 17949 - DNA, 301 bp, Artificial Sequence
  Kmt2d.2_NTC.3
  crRNA array
  misc_feature (148)..(157): n is a, c, g, or t
cttggctttatatatcttgtggaaaggacgaaacaccgtaatttctactaagtgtagatggggaccatagccaggagagtaatttctactaagtgtagattcgacgcgagacgacgtacataatttctactaagtgtagatttttttnnnnnnnnnnaagcttggcgtggatccgatatcaactagatcttgagacaaatggcagtattcatccacaattttaaaagaaaaggggggattggggggtacagtgcaggggaaagaatagtagacataatagcaacagacatacaaactaaag

SEQ ID NO: 17950 - DNA, 301 bp, Artificial Sequence
  Kmt2d.2_NTC.30
  crRNA array
  misc_feature (148)..(157): n is a, c, g, or t
cttggctttatatatcttgtggaaaggacgaaacaccgtaatttctactaagtgtagatggggaccatagccaggagagtaatttctactaagtgtagatcgatcgtacgggtgtcctaataatttctactaagtgtagatttttttnnnnnnnnnnaagcttggcgtggatccgatatcaactagatcttgagacaaatggcagtattcatccacaattttaaaagaaaaggggggattggggggtacagtgcaggggaaagaatagtagacataatagcaacagacatacaaactaaag

SEQ ID NO: 17951 - DNA, 301 bp, Artificial Sequence
  Kmt2d.2_NTC.31
  crRNA array
  misc_feature (148)..(157): n is a, c, g, or t
cttggctttatatatcttgtggaaaggacgaaacaccgtaatttctactaagtgtagatggggaccatagccaggagagtaatttctactaagtgtagatgccgaccgcgtgattgtaggtaatttctactaagtgtagatttttttnnnnnnnnnnaagcttggcgtggatccgatatcaactagatcttgagacaaatggcagtattcatccacaattttaaaagaaaaggggggattggggggtacagtgcaggggaaagaatagtagacataatagcaacagacatacaaactaaag

SEQ ID NO: 17952 - DNA, 301 bp, Artificial Sequence
  Kmt2d.2_NTC.32
  crRNA array
  misc_feature (148)..(157): n is a, c, g, or t
cttggctttatatatcttgtggaaaggacgaaacaccgtaatttctactaagtgtagatggggaccatagccaggagagtaatttctactaagtgtagatgcacgttacgcccgggtcactaatttctactaagtgtagatttttttnnnnnnnnnnaagcttggcgtggatccgatatcaactagatcttgagacaaatggcagtattcatccacaattttaaaagaaaaggggggattggggggtacagtgcaggggaaagaatagtagacataatagcaacagacatacaaactaaag

SEQ ID NO: 17953 - DNA, 301 bp, Artificial Sequence
  Kmt2d.2_NTC.33
  crRNA array
  misc_feature (148)..(157): n is a, c, g, or t
cttggctttatatatcttgtggaaaggacgaaacaccgtaatttctactaagtgtagatggggaccatagccaggagagtaatttctactaagtgtagattaagcgaccgacgcattcgctaatttctactaagtgtagatttttttnnnnnnnnnnaagcttggcgtggatccgatatcaactagatcttgagacaaatggcagtattcatccacaattttaaaagaaaaggggggattggggggtacagtgcaggggaaagaatagtagacataatagcaacagacatacaaactaaag

SEQ ID NO: 17954 - DNA, 301 bp, Artificial Sequence
  Kmt2d.2_NTC.34
  crRNA array
  misc_feature (148)..(157): n is a, c, g, or t
cttggctttatatatcttgtggaaaggacgaaacaccgtaatttctactaagtgtagatggggaccatagccaggagagtaatttctactaagtgtagattagcgttcgacacgtgaaactaatttctactaagtgtagatttttttnnnnnnnnnnaagcttggcgtggatccgatatcaactagatcttgagacaaatggcagtattcatccacaattttaaaagaaaaggggggattggggggtacagtgcaggggaaagaatagtagacataatagcaacagacatacaaactaaag

SEQ ID NO: 17955 - DNA, 301 bp, Artificial Sequence
  Kmt2d.2_NTC.35
  crRNA array
  misc_feature (148)..(157): n is a, c, g, or t
cttggctttatatatcttgtggaaaggacgaaacaccgtaatttctactaagtgtagatggggaccatagccaggagagtaatttctactaagtgtagattggcgcgtaatcgctattcgtaatttctactaagtgtagatttttttnnnnnnnnnnaagcttggcgtggatccgatatcaactagatcttgagacaaatggcagtattcatccacaattttaaaagaaaaggggggattggggggtacagtgcaggggaaagaatagtagacataatagcaacagacatacaaactaaag

SEQ ID NO: 17956 - DNA, 301 bp, Artificial Sequence
  Kmt2d.2_NTC.36
  crRNA array
  misc_feature (148)..(157): n is a, c, g, or t
cttggctttatatatcttgtggaaaggacgaaacaccgtaatttctactaagtgtagatggggaccatagccaggagagtaatttctactaagtgtagatcaacccgccgtagcgggccttaatttctactaagtgtagatttttttnnnnnnnnnnaagcttggcgtggatccgatatcaactagatcttgagacaaatggcagtattcatccacaattttaaaagaaaaggggggattggggggtacagtgcaggggaaagaatagtagacataatagcaacagacatacaaactaaag

SEQ ID NO: 17957 - DNA, 301 bp, Artificial Sequence
  Kmt2d.2_NTC.37
  crRNA array
  misc_feature (148)..(157): n is a, c, g, or t
cttggctttatatatcttgtggaaaggacgaaacaccgtaatttctactaagtgtagatggggaccatagccaggagagtaatttctactaagtgtagattttgcgttgacgcgattacttaatttctactaagtgtagatttttttnnnnnnnnnnaagcttggcgtggatccgatatcaactagatcttgagacaaatggcagtattcatccacaattttaaaagaaaaggggggattggggggtacagtgcaggggaaagaatagtagacataatagcaacagacatacaaactaaag

SEQ ID NO: 17958 - DNA, 301 bp, Artificial Sequence
  Kmt2d.2_NTC.38
  crRNA array
  misc_feature (148)..(157): n is a, c, g, or t
cttggctttatatatcttgtggaaaggacgaaacaccgtaatttctactaagtgtagatggggaccatagccaggagagtaatttctactaagtgtagataacggagcgcgatactaccataatttctactaagtgtagatttttttnnnnnnnnnnaagcttggcgtggatccgatatcaactagatcttgagacaaatggcagtattcatccacaattttaaaagaaaaggggggattggggggtacagtgcaggggaaagaatagtagacataatagcaacagacatacaaactaaag

SEQ ID NO: 17959 - DNA, 301 bp, Artificial Sequence
  Kmt2d.2_NTC.39
  crRNA array
  misc_feature (148)..(157): n is a, c, g, or t
cttggctttatatatcttgtggaaaggacgaaacaccgtaatttctactaagtgtagatggggaccatagccaggagagtaatttctactaagtgtagatccggacgttataacgtttcttaatttctactaagtgtagatttttttnnnnnnnnnnaagcttggcgtggatccgatatcaactagatcttgagacaaatggcagtattcatccacaattttaaaagaaaaggggggattggggggtacagtgcaggggaaagaatagtagacataatagcaacagacatacaaactaaag

SEQ ID NO: 17960 - DNA, 301 bp, Artificial Sequence
  Kmt2d.2_NTC.4
  crRNA array
  misc_feature (148)..(157): n is a, c, g, or t
cttggctttatatatcttgtggaaaggacgaaacaccgtaatttctactaagtgtagatggggaccatagccaggagagtaatttctactaagtgtagatatacccgtcgcgaacgtgagtaatttctactaagtgtagatttttttnnnnnnnnnnaagcttggcgtggatccgatatcaactagatcttgagacaaatggcagtattcatccacaattttaaaagaaaaggggggattggggggtacagtgcaggggaaagaatagtagacataatagcaacagacatacaaactaaag

SEQ ID NO: 17961 - DNA, 301 bp, Artificial Sequence
  Kmt2d.2_NTC.40
  crRNA array
  misc_feature (148)..(157): n is a, c, g, or t
cttggctttatatatcttgtggaaaggacgaaacaccgtaatttctactaagtgtagatggggaccatagccaggagagtaatttctactaagtgtagatattcgcgaacccggccggaataatttctactaagtgtagatttttttnnnnnnnnnnaagcttggcgtggatccgatatcaactagatcttgagacaaatggcagtattcatccacaattttaaaagaaaaggggggattggggggtacagtgcaggggaaagaatagtagacataatagcaacagacatacaaactaaag

SEQ ID NO: 17962 - DNA, 301 bp, Artificial Sequence
  Kmt2d.2_NTC.41
  crRNA array
  misc_feature (148)..(157): n is a, c, g, or t
cttggctttatatatcttgtggaaaggacgaaacaccgtaatttctactaagtgtagatggggaccatagccaggagagtaatttctactaagtgtagatttgatggcgcgacgcgttattaatttctactaagtgtagatttttttnnnnnnnnnnaagcttggcgtggatccgatatcaactagatcttgagacaaatggcagtattcatccacaattttaaaagaaaaggggggattggggggtacagtgcaggggaaagaatagtagacataatagcaacagacatacaaactaaag

SEQ ID NO: 17963 - DNA, 301 bp, Artificial Sequence
  Kmt2d.2_NTC.42
  crRNA array
  misc_feature (148)..(157): n is a, c, g, or t
cttggctttatatatcttgtggaaaggacgaaacaccgtaatttctactaagtgtagatggggaccatagccaggagagtaatttctactaagtgtagatggtcaaatcgcggcgataactaatttctactaagtgtagatttttttnnnnnnnnnnaagcttggcgtggatccgatatcaactagatcttgagacaaatggcagtattcatccacaattttaaaagaaaaggggggattggggggtacagtgcaggggaaagaatagtagacataatagcaacagacatacaaactaaag

SEQ ID NO: 17964 - DNA, 301 bp, Artificial Sequence
  Kmt2d.2_NTC.43
  crRNA array
  misc_feature (148)..(157): n is a, c, g, or t
cttggctttatatatcttgtggaaaggacgaaacaccgtaatttctactaagtgtagatggggaccatagccaggagagtaatttctactaagtgtagatcgactcgcgcattgaactggtaatttctactaagtgtagatttttttnnnnnnnnnnaagcttggcgtggatccgatatcaactagatcttgagacaaatggcagtattcatccacaattttaaaagaaaaggggggattggggggtacagtgcaggggaaagaatagtagacataatagcaacagacatacaaactaaag

SEQ ID NO: 17965 - DNA, 301 bp, Artificial Sequence
  Kmt2d.2_NTC.44
  crRNA array
  misc_feature (148)..(157): n is a, c, g, or t
cttggctttatatatcttgtggaaaggacgaaacaccgtaatttctactaagtgtagatggggaccatagccaggagagtaatttctactaagtgtagatagcgtcgtacgatttatcgttaatttctactaagtgtagatttttttnnnnnnnnnnaagcttggcgtggatccgatatcaactagatcttgagacaaatggcagtattcatccacaattttaaaagaaaaggggggattggggggtacagtgcaggggaaagaatagtagacataatagcaacagacatacaaactaaag

SEQ ID NO: 17966 - DNA, 301 bp, Artificial Sequence
  Kmt2d.2_NTC.45
  crRNA array
  misc_feature (148)..(157): n is a, c, g, or t
cttggctttatatatcttgtggaaaggacgaaacaccgtaatttctactaagtgtagatggggaccatagccaggagagtaatttctactaagtgtagatcggaacgcgtgatactagggtaatttctactaagtgtagatttttttnnnnnnnnnnaagcttggcgtggatccgatatcaactagatcttgagacaaatggcagtattcatccacaattttaaaagaaaaggggggattggggggtacagtgcaggggaaagaatagtagacataatagcaacagacatacaaactaaag

SEQ ID NO: 17967 - DNA, 301 bp, Artificial Sequence
  Kmt2d.2_NTC.46
  crRNA array
  misc_feature (148)..(157): n is a, c, g, or t
cttggctttatatatcttgtggaaaggacgaaacaccgtaatttctactaagtgtagatggggaccatagccaggagagtaatttctactaagtgtagatagcgggtcgtagacgcgcggtaatttctactaagtgtagatttttttnnnnnnnnnnaagcttggcgtggatccgatatcaactagatcttgagacaaatggcagtattcatccacaattttaaaagaaaaggggggattggggggtacagtgcaggggaaagaatagtagacataatagcaacagacatacaaactaaag

SEQ ID NO: 17968 - DNA, 301 bp, Artificial Sequence
  Kmt2d.2_NTC.47
  crRNA array
  misc_feature (148)..(157): n is a, c, g, or t
cttggctttatatatcttgtggaaaggacgaaacaccgtaatttctactaagtgtagatggggaccatagccaggagagtaatttctactaagtgtagattctcgtatcgcgattgttaataatttctactaagtgtagatttttttnnnnnnnnnnaagcttggcgtggatccgatatcaactagatcttgagacaaatggcagtattcatccacaattttaaaagaaaaggggggattggggggtacagtgcaggggaaagaatagtagacataatagcaacagacatacaaactaaag

SEQ ID NO: 17969 - DNA, 301 bp, Artificial Sequence
  Kmt2d.2_NTC.48
  crRNA array
  misc_feature (148)..(157): n is a, c, g, or t
cttggctttatatatcttgtggaaaggacgaaacaccgtaatttctactaagtgtagatggggaccatagccaggagagtaatttctactaagtgtagatcggtcgactacggctgttagtaatttctactaagtgtagatttttttnnnnnnnnnnaagcttggcgtggatccgatatcaactagatcttgagacaaatggcagtattcatccacaattttaaaagaaaaggggggattggggggtacagtgcaggggaaagaatagtagacataatagcaacagacatacaaactaaag

SEQ ID NO: 17970 - DNA, 301 bp, Artificial Sequence
  Kmt2d.2_NTC.49
  crRNA array
  misc_feature (148)..(157): n is a, c, g, or t
cttggctttatatatcttgtggaaaggacgaaacaccgtaatttctactaagtgtagatggggaccatagccaggagagtaatttctactaagtgtagattcggggcgcgtcaactgaattaatttctactaagtgtagatttttttnnnnnnnnnnaagcttggcgtggatccgatatcaactagatcttgagacaaatggcagtattcatccacaattttaaaagaaaaggggggattggggggtacagtgcaggggaaagaatagtagacataatagcaacagacatacaaactaaag

SEQ ID NO: 17971 - DNA, 301 bp, Artificial Sequence
  Kmt2d.2_NTC.5
  crRNA array
  misc_feature (148)..(157): n is a, c, g, or t
cttggctttatatatcttgtggaaaggacgaaacaccgtaatttctactaagtgtagatggggaccatagccaggagagtaatttctactaagtgtagatgcttacgcgtcgcgaatgtataatttctactaagtgtagatttttttnnnnnnnnnnaagcttggcgtggatccgatatcaactagatcttgagacaaatggcagtattcatccacaattttaaaagaaaaggggggattggggggtacagtgcaggggaaagaatagtagacataatagcaacagacatacaaactaaag

SEQ ID NO: 17972 - DNA, 301 bp, Artificial Sequence
  Kmt2d.2_NTC.50
  crRNA array
  misc_feature (148)..(157): n is a, c, g, or t
cttggctttatatatcttgtggaaaggacgaaacaccgtaatttctactaagtgtagatggggaccatagccaggagagtaatttctactaagtgtagatattgccgctcgcgcaaaatctaatttctactaagtgtagatttttttnnnnnnnnnnaagcttggcgtggatccgatatcaactagatcttgagacaaatggcagtattcatccacaattttaaaagaaaaggggggattggggggtacagtgcaggggaaagaatagtagacataatagcaacagacatacaaactaaag

SEQ ID NO: 17973 - DNA, 301 bp, Artificial Sequence
  Kmt2d.2_NTC.51
  crRNA array
  misc_feature (148)..(157): n is a, c, g, or t
cttggctttatatatcttgtggaaaggacgaaacaccgtaatttctactaagtgtagatggggaccatagccaggagagtaatttctactaagtgtagattaacgcgcaacacgccaatgtaatttctactaagtgtagatttttttnnnnnnnnnnaagcttggcgtggatccgatatcaactagatcttgagacaaatggcagtattcatccacaattttaaaagaaaaggggggattggggggtacagtgcaggggaaagaatagtagacataatagcaacagacatacaaactaaag

SEQ ID NO: 17974 - DNA, 301 bp, Artificial Sequence
  Kmt2d.2_NTC.6
  crRNA array
  misc_feature (148)..(157): n is a, c, g, or t
cttggctttatatatcttgtggaaaggacgaaacaccgtaatttctactaagtgtagatggggaccatagccaggagagtaatttctactaagtgtagatcgaatcgcgcctacgggaattaatttctactaagtgtagatttttttnnnnnnnnnnaagcttggcgtggatccgatatcaactagatcttgagacaaatggcagtattcatccacaattttaaaagaaaaggggggattggggggtacagtgcaggggaaagaatagtagacataatagcaacagacatacaaactaaag

SEQ ID NO: 17975 - DNA, 301 bp, Artificial Sequence
  Kmt2d.2_NTC.7
  crRNA array
  misc_feature (148)..(157): n is a, c, g, or t
cttggctttatatatcttgtggaaaggacgaaacaccgtaatttctactaagtgtagatggggaccatagccaggagagtaatttctactaagtgtagatcgccgaacggataagactattaatttctactaagtgtagatttttttnnnnnnnnnnaagcttggcgtggatccgatatcaactagatcttgagacaaatggcagtattcatccacaattttaaaagaaaaggggggattggggggtacagtgcaggggaaagaatagtagacataatagcaacagacatacaaactaaag

SEQ ID NO: 17976 - DNA, 301 bp, Artificial Sequence
  Kmt2d.2_NTC.8
  crRNA array
  misc_feature (148)..(157): n is a, c, g, or t
cttggctttatatatcttgtggaaaggacgaaacaccgtaatttctactaagtgtagatggggaccatagccaggagagtaatttctactaagtgtagatcgaccgaggttacgctgggataatttctactaagtgtagatttttttnnnnnnnnnnaagcttggcgtggatccgatatcaactagatcttgagacaaatggcagtattcatccacaattttaaaagaaaaggggggattggggggtacagtgcaggggaaagaatagtagacataatagcaacagacatacaaactaaag

SEQ ID NO: 17977 - DNA, 301 bp, Artificial Sequence
  Kmt2d.2_NTC.9
  crRNA array
  misc_feature (148)..(157): n is a, c, g, or t
cttggctttatatatcttgtggaaaggacgaaacaccgtaatttctactaagtgtagatggggaccatagccaggagagtaatttctactaagtgtagatatcgccgtacggctatggcataatttctactaagtgtagatttttttnnnnnnnnnnaagcttggcgtggatccgatatcaactagatcttgagacaaatggcagtattcatccacaattttaaaagaaaaggggggattggggggtacagtgcaggggaaagaatagtagacataatagcaacagacatacaaactaaag

SEQ ID NO: 17978 - DNA, 301 bp, Artificial Sequence
  Kmt2d.3_NTC.0
  crRNA array
  misc_feature (148)..(157): n is a, c, g, or t
cttggctttatatatcttgtggaaaggacgaaacaccgtaatttctactaagtgtagataggaaggggtcaggcgtggataatttctactaagtgtagattatagcgtcgcgcgctaatttaatttctactaagtgtagatttttttnnnnnnnnnnaagcttggcgtggatccgatatcaactagatcttgagacaaatggcagtattcatccacaattttaaaagaaaaggggggattggggggtacagtgcaggggaaagaatagtagacataatagcaacagacatacaaactaaag

SEQ ID NO: 17979 - DNA, 301 bp, Artificial Sequence
  Kmt2d.3_NTC.1
  crRNA array
  misc_feature (148)..(157): n is a, c, g, or t
cttggctttatatatcttgtggaaaggacgaaacaccgtaatttctactaagtgtagataggaaggggtcaggcgtggataatttctactaagtgtagatcgcgtaaccgttccggctcctaatttctactaagtgtagatttttttnnnnnnnnnnaagcttggcgtggatccgatatcaactagatcttgagacaaatggcagtattcatccacaattttaaaagaaaaggggggattggggggtacagtgcaggggaaagaatagtagacataatagcaacagacatacaaactaaag

SEQ ID NO: 17980 - DNA, 301 bp, Artificial Sequence
  Kmt2d.3_NTC.10
  crRNA array
  misc_feature (148)..(157): n is a, c, g, or t
cttggctttatatatcttgtggaaaggacgaaacaccgtaatttctactaagtgtagataggaaggggtcaggcgtggataatttctactaagtgtagatcgctaagttcgcgcgggccgtaatttctactaagtgtagatttttttnnnnnnnnnnaagcttggcgtggatccgatatcaactagatcttgagacaaatggcagtattcatccacaattttaaaagaaaaggggggattggggggtacagtgcaggggaaagaatagtagacataatagcaacagacatacaaactaaag

SEQ ID NO: 17981 - DNA, 301 bp, Artificial Sequence
  Kmt2d.3_NTC.11
  crRNA array
  misc_feature (148)..(157): n is a, c, g, or t
cttggctttatatatcttgtggaaaggacgaaacaccgtaatttctactaagtgtagataggaaggggtcaggcgtggataatttctactaagtgtagatcgttcgtcgacgaagcaatctaatttctactaagtgtagatttttttnnnnnnnnnnaagcttggcgtggatccgatatcaactagatcttgagacaaatggcagtattcatccacaattttaaaagaaaaggggggattggggggtacagtgcaggggaaagaatagtagacataatagcaacagacatacaaactaaag

SEQ ID NO: 17982 - DNA, 301 bp, Artificial Sequence
  Kmt2d.3_NTC.12
  crRNA array
  misc_feature (148)..(157): n is a, c, g, or t
cttggctttatatatcttgtggaaaggacgaaacaccgtaatttctactaagtgtagataggaaggggtcaggcgtggataatttctactaagtgtagatcgccgacgattaatcaatagtaatttctactaagtgtagatttttttnnnnnnnnnnaagcttggcgtggatccgatatcaactagatcttgagacaaatggcagtattcatccacaattttaaaagaaaaggggggattggggggtacagtgcaggggaaagaatagtagacataatagcaacagacatacaaactaaag

SEQ ID NO: 17983 - DNA, 301 bp, Artificial Sequence
  Kmt2d.3_NTC.13
  crRNA array
  misc_feature (148)..(157): n is a, c, g, or t
cttggctttatatatcttgtggaaaggacgaaacaccgtaatttctactaagtgtagataggaaggggtcaggcgtggataatttctactaagtgtagatgaccgttgtatcgcgatcaataatttctactaagtgtagatttttttnnnnnnnnnnaagcttggcgtggatccgatatcaactagatcttgagacaaatggcagtattcatccacaattttaaaagaaaaggggggattggggggtacagtgcaggggaaagaatagtagacataatagcaacagacatacaaactaaag

SEQ ID NO: 17984 - DNA, 301 bp, Artificial Sequence
  Kmt2d.3_NTC.14
  crRNA array
  misc_feature (148)..(157): n is a, c, g, or t
cttggctttatatatcttgtggaaaggacgaaacaccgtaatttctactaagtgtagataggaaggggtcaggcgtggataatttctactaagtgtagatccgttcgtgcgatagtgttttaatttctactaagtgtagatttttttnnnnnnnnnnaagcttggcgtggatccgatatcaactagatcttgagacaaatggcagtattcatccacaattttaaaagaaaaggggggattggggggtacagtgcaggggaaagaatagtagacataatagcaacagacatacaaactaaag

SEQ ID NO: 17985 - DNA, 301 bp, Artificial Sequence
  Kmt2d.3_NTC.15
  crRNA array
  misc_feature (148)..(157): n is a, c, g, or t
cttggctttatatatcttgtggaaaggacgaaacaccgtaatttctactaagtgtagataggaaggggtcaggcgtggataatttctactaagtgtagatgttgtcgtgccgcgaatttataatttctactaagtgtagatttttttnnnnnnnnnnaagcttggcgtggatccgatatcaactagatcttgagacaaatggcagtattcatccacaattttaaaagaaaaggggggattggggggtacagtgcaggggaaagaatagtagacataatagcaacagacatacaaactaaag

SEQ ID NO: 17986 - DNA, 301 bp, Artificial Sequence
  Kmt2d.3_NTC.16
  crRNA array
  misc_feature (148)..(157): n is a, c, g, or t
cttggctttatatatcttgtggaaaggacgaaacaccgtaatttctactaagtgtagataggaaggggtcaggcgtggataatttctactaagtgtagatcggtacgttagacgaaaatttaatttctactaagtgtagatttttttnnnnnnnnnnaagcttggcgtggatccgatatcaactagatcttgagacaaatggcagtattcatccacaattttaaaagaaaaggggggattggggggtacagtgcaggggaaagaatagtagacataatagcaacagacatacaaactaaag

SEQ ID NO: 17987 - DNA, 301 bp, Artificial Sequence
  Kmt2d.3_NTC.17
  crRNA array
  misc_feature (148)..(157): n is a, c, g, or t
cttggctttatatatcttgtggaaaggacgaaacaccgtaatttctactaagtgtagataggaaggggtcaggcgtggataatttctactaagtgtagattatcgaacgctatcgaacgttaatttctactaagtgtagatttttttnnnnnnnnnnaagcttggcgtggatccgatatcaactagatcttgagacaaatggcagtattcatccacaattttaaaagaaaaggggggattggggggtacagtgcaggggaaagaatagtagacataatagcaacagacatacaaactaaag

SEQ ID NO: 17988 - DNA, 301 bp, Artificial Sequence
  Kmt2d.3_NTC.18
  crRNA array
  misc_feature (148)..(157): n is a, c, g, or t
cttggctttatatatcttgtggaaaggacgaaacaccgtaatttctactaagtgtagataggaaggggtcaggcgtggataatttctactaagtgtagattccggttacgaccggcaaaataatttctactaagtgtagatttttttnnnnnnnnnnaagcttggcgtggatccgatatcaactagatcttgagacaaatggcagtattcatccacaattttaaaagaaaaggggggattggggggtacagtgcaggggaaagaatagtagacataatagcaacagacatacaaactaaag

SEQ ID NO: 17989 - DNA, 301 bp, Artificial Sequence
  Kmt2d.3_NTC.19
  crRNA array
  misc_feature (148)..(157): n is a, c, g, or t
cttggctttatatatcttgtggaaaggacgaaacaccgtaatttctactaagtgtagataggaaggggtcaggcgtggataatttctactaagtgtagatcgtcgtagaacgatacccgataatttctactaagtgtagatttttttnnnnnnnnnnaagcttggcgtggatccgatatcaactagatcttgagacaaatggcagtattcatccacaattttaaaagaaaaggggggattggggggtacagtgcaggggaaagaatagtagacataatagcaacagacatacaaactaaag

SEQ ID NO: 17990 - DNA, 301 bp, Artificial Sequence
  Kmt2d.3_NTC.2
  crRNA array
  misc_feature (148)..(157): n is a, c, g, or t
cttggctttatatatcttgtggaaaggacgaaacaccgtaatttctactaagtgtagataggaaggggtcaggcgtggataatttctactaagtgtagatttatgtcgcgccgcgacccgtaatttctactaagtgtagatttttttnnnnnnnnnnaagcttggcgtggatccgatatcaactagatcttgagacaaatggcagtattcatccacaattttaaaagaaaaggggggattggggggtacagtgcaggggaaagaatagtagacataatagcaacagacatacaaactaaag

SEQ ID NO: 17991 - DNA, 301 bp, Artificial Sequence
  Kmt2d.3_NTC.20
  crRNA array
  misc_feature (148)..(157): n is a, c, g, or t
cttggctttatatatcttgtggaaaggacgaaacaccgtaatttctactaagtgtagataggaaggggtcaggcgtggataatttctactaagtgtagatattccggcgcgaccagaagataatttctactaagtgtagatttttttnnnnnnnnnnaagcttggcgtggatccgatatcaactagatcttgagacaaatggcagtattcatccacaattttaaaagaaaaggggggattggggggtacagtgcaggggaaagaatagtagacataatagcaacagacatacaaactaaag

SEQ ID NO: 17992 - DNA, 301 bp, Artificial Sequence
  Kmt2d.3_NTC.21
  crRNA array
  misc_feature (148)..(157): n is a, c, g, or t
cttggctttatatatcttgtggaaaggacgaaacaccgtaatttctactaagtgtagataggaaggggtcaggcgtggataatttctactaagtgtagatgtataacttcgcgcggtccgtaatttctactaagtgtagatttttttnnnnnnnnnnaagcttggcgtggatccgatatcaactagatcttgagacaaatggcagtattcatccacaattttaaaagaaaaggggggattggggggtacagtgcaggggaaagaatagtagacataatagcaacagacatacaaactaaag

SEQ ID NO: 17993 - DNA, 301 bp, Artificial Sequence
  Kmt2d.3_NTC.22
  crRNA array
  misc_feature (148)..(157): n is a, c, g, or t
cttggctttatatatcttgtggaaaggacgaaacaccgtaatttctactaagtgtagataggaaggggtcaggcgtggataatttctactaagtgtagatgcgcgtcaacgtaatgtgcctaatttctactaagtgtagatttttttnnnnnnnnnnaagcttggcgtggatccgatatcaactagatcttgagacaaatggcagtattcatccacaattttaaaagaaaaggggggattggggggtacagtgcaggggaaagaatagtagacataatagcaacagacatacaaactaaag

SEQ ID NO: 17994 - DNA, 301 bp, Artificial Sequence
  Kmt2d.3_NTC.23
  crRNA array
  misc_feature (148)..(157): n is a, c, g, or t
cttggctttatatatcttgtggaaaggacgaaacaccgtaatttctactaagtgtagataggaaggggtcaggcgtggataatttctactaagtgtagatacgcgctattatcgtaggtgtaatttctactaagtgtagatttttttnnnnnnnnnnaagcttggcgtggatccgatatcaactagatcttgagacaaatggcagtattcatccacaattttaaaagaaaaggggggattggggggtacagtgcaggggaaagaatagtagacataatagcaacagacatacaaactaaag

SEQ ID NO: 17995 - DNA, 301 bp, Artificial Sequence
  Kmt2d.3_NTC.24
  crRNA array
  misc_feature (148)..(157): n is a, c, g, or t
cttggctttatatatcttgtggaaaggacgaaacaccgtaatttctactaagtgtagataggaaggggtcaggcgtggataatttctactaagtgtagatactatcgacgttcgtcccggtaatttctactaagtgtagatttttttnnnnnnnnnnaagcttggcgtggatccgatatcaactagatcttgagacaaatggcagtattcatccacaattttaaaagaaaaggggggattggggggtacagtgcaggggaaagaatagtagacataatagcaacagacatacaaactaaag

SEQ ID NO: 17996 - DNA, 301 bp, Artificial Sequence
  Kmt2d.3_NTC.25
  crRNA array
  misc_feature (148)..(157): n is a, c, g, or t
cttggctttatatatcttgtggaaaggacgaaacaccgtaatttctactaagtgtagataggaaggggtcaggcgtggataatttctactaagtgtagattcgcgttatcgtgccgtgcgtaatttctactaagtgtagatttttttnnnnnnnnnnaagcttggcgtggatccgatatcaactagatcttgagacaaatggcagtattcatccacaattttaaaagaaaaggggggattggggggtacagtgcaggggaaagaatagtagacataatagcaacagacatacaaactaaag

SEQ ID NO: 17997 - DNA, 301 bp, Artificial Sequence
  Kmt2d.3_NTC.26
  crRNA array
  misc_feature (148)..(157): n is a, c, g, or t
cttggctttatatatcttgtggaaaggacgaaacaccgtaatttctactaagtgtagataggaaggggtcaggcgtggataatttctactaagtgtagatcgcgacggcggttttaacactaatttctactaagtgtagatttttttnnnnnnnnnnaagcttggcgtggatccgatatcaactagatcttgagacaaatggcagtattcatccacaattttaaaagaaaaggggggattggggggtacagtgcaggggaaagaatagtagacataatagcaacagacatacaaactaaag

SEQ ID NO: 17998 - DNA, 301 bp, Artificial Sequence
  Kmt2d.3_NTC.27
  crRNA array
  misc_feature (148)..(157): n is a, c, g, or t
cttggctttatatatcttgtggaaaggacgaaacaccgtaatttctactaagtgtagataggaaggggtcaggcgtggataatttctactaagtgtagatgtcgcgttgcgaccggcgcttaatttctactaagtgtagatttttttnnnnnnnnnnaagcttggcgtggatccgatatcaactagatcttgagacaaatggcagtattcatccacaattttaaaagaaaaggggggattggggggtacagtgcaggggaaagaatagtagacataatagcaacagacatacaaactaaag

SEQ ID NO: 17999 - DNA, 301 bp, Artificial Sequence
  Kmt2d.3_NTC.28
  crRNA array
  misc_feature (148)..(157): n is a, c, g, or t
cttggctttatatatcttgtggaaaggacgaaacaccgtaatttctactaagtgtagataggaaggggtcaggcgtggataatttctactaagtgtagataccgctaatcggcgtaaacttaatttctactaagtgtagatttttttnnnnnnnnnnaagcttggcgtggatccgatatcaactagatcttgagacaaatggcagtattcatccacaattttaaaagaaaaggggggattggggggtacagtgcaggggaaagaatagtagacataatagcaacagacatacaaactaaag

SEQ ID NO: 18000 - DNA, 301 bp, Artificial Sequence
  Kmt2d.3_NTC.29
  crRNA array
  misc_feature (148)..(157): n is a, c, g, or t
cttggctttatatatcttgtggaaaggacgaaacaccgtaatttctactaagtgtagataggaaggggtcaggcgtggataatttctactaagtgtagatcgcgatctataccgtctatataatttctactaagtgtagatttttttnnnnnnnnnnaagcttggcgtggatccgatatcaactagatcttgagacaaatggcagtattcatccacaattttaaaagaaaaggggggattggggggtacagtgcaggggaaagaatagtagacataatagcaacagacatacaaactaaag

SEQ ID NO: 18001 - DNA, 301 bp, Artificial Sequence
  Kmt2d.3_NTC.3
  crRNA array
  misc_feature (148)..(157): n is a, c, g, or t
cttggctttatatatcttgtggaaaggacgaaacaccgtaatttctactaagtgtagataggaaggggtcaggcgtggataatttctactaagtgtagattcgacgcgagacgacgtacataatttctactaagtgtagatttttttnnnnnnnnnnaagcttggcgtggatccgatatcaactagatcttgagacaaatggcagtattcatccacaattttaaaagaaaaggggggattggggggtacagtgcaggggaaagaatagtagacataatagcaacagacatacaaactaaag

SEQ ID NO: 18002 - DNA, 301 bp, Artificial Sequence
  Kmt2d.3_NTC.30
  crRNA array
  misc_feature (148)..(157): n is a, c, g, or t
cttggctttatatatcttgtggaaaggacgaaacaccgtaatttctactaagtgtagataggaaggggtcaggcgtggataatttctactaagtgtagatcgatcgtacgggtgtcctaataatttctactaagtgtagatttttttnnnnnnnnnnaagcttggcgtggatccgatatcaactagatcttgagacaaatggcagtattcatccacaattttaaaagaaaaggggggattggggggtacagtgcaggggaaagaatagtagacataatagcaacagacatacaaactaaag

SEQ ID NO: 18003 - DNA, 301 bp, Artificial Sequence
  Kmt2d.3_NTC.31
  crRNA array
  misc_feature (148)..(157): n is a, c, g, or t
cttggctttatatatcttgtggaaaggacgaaacaccgtaatttctactaagtgtagataggaaggggtcaggcgtggataatttctactaagtgtagatgccgaccgcgtgattgtaggtaatttctactaagtgtagatttttttnnnnnnnnnnaagcttggcgtggatccgatatcaactagatcttgagacaaatggcagtattcatccacaattttaaaagaaaaggggggattggggggtacagtgcaggggaaagaatagtagacataatagcaacagacatacaaactaaag

SEQ ID NO: 18004 - DNA, 301 bp, Artificial Sequence
  Kmt2d.3_NTC.32
  crRNA array
  misc_feature (148)..(157): n is a, c, g, or t
cttggctttatatatcttgtggaaaggacgaaacaccgtaatttctactaagtgtagataggaaggggtcaggcgtggataatttctactaagtgtagatgcacgttacgcccgggtcactaatttctactaagtgtagatttttttnnnnnnnnnnaagcttggcgtggatccgatatcaactagatcttgagacaaatggcagtattcatccacaattttaaaagaaaaggggggattggggggtacagtgcaggggaaagaatagtagacataatagcaacagacatacaaactaaag

SEQ ID NO: 18005 - DNA, 301 bp, Artificial Sequence
  Kmt2d.3_NTC.33
  crRNA array
  misc_feature (148)..(157): n is a, c, g, or t
cttggctttatatatcttgtggaaaggacgaaacaccgtaatttctactaagtgtagataggaaggggtcaggcgtggataatttctactaagtgtagattaagcgaccgacgcattcgctaatttctactaagtgtagatttttttnnnnnnnnnnaagcttggcgtggatccgatatcaactagatcttgagacaaatggcagtattcatccacaattttaaaagaaaaggggggattggggggtacagtgcaggggaaagaatagtagacataatagcaacagacatacaaactaaag

SEQ ID NO: 18006 - DNA, 301 bp, Artificial Sequence
  Kmt2d.3_NTC.34
  crRNA array
  misc_feature (148)..(157): n is a, c, g, or t
cttggctttatatatcttgtggaaaggacgaaacaccgtaatttctactaagtgtagataggaaggggtcaggcgtggataatttctactaagtgtagattagcgttcgacacgtgaaactaatttctactaagtgtagatttttttnnnnnnnnnnaagcttggcgtggatccgatatcaactagatcttgagacaaatggcagtattcatccacaattttaaaagaaaaggggggattggggggtacagtgcaggggaaagaatagtagacataatagcaacagacatacaaactaaag

SEQ ID NO: 18007 - DNA, 301 bp, Artificial Sequence
  Kmt2d.3_NTC.35
  crRNA array
  misc_feature (148)..(157): n is a, c, g, or t
cttggctttatatatcttgtggaaaggacgaaacaccgtaatttctactaagtgtagataggaaggggtcaggcgtggataatttctactaagtgtagattggcgcgtaatcgctattcgtaatttctactaagtgtagatttttttnnnnnnnnnnaagcttggcgtggatccgatatcaactagatcttgagacaaatggcagtattcatccacaattttaaaagaaaaggggggattggggggtacagtgcaggggaaagaatagtagacataatagcaacagacatacaaactaaag

SEQ ID NO: 18008 - DNA, 301 bp, Artificial Sequence
  Kmt2d.3_NTC.36
  crRNA array
  misc_feature (148)..(157): n is a, c, g, or t
cttggctttatatatcttgtggaaaggacgaaacaccgtaatttctactaagtgtagataggaaggggtcaggcgtggataatttctactaagtgtagatcaacccgccgtagcgggccttaatttctactaagtgtagatttttttnnnnnnnnnnaagcttggcgtggatccgatatcaactagatcttgagacaaatggcagtattcatccacaattttaaaagaaaaggggggattggggggtacagtgcaggggaaagaatagtagacataatagcaacagacatacaaactaaag

SEQ ID NO: 18009 - DNA, 301 bp, Artificial Sequence
  Kmt2d.3_NTC.37
  crRNA array
  misc_feature (148)..(157): n is a, c, g, or t
cttggctttatatatcttgtggaaaggacgaaacaccgtaatttctactaagtgtagataggaaggggtcaggcgtggataatttctactaagtgtagattttgcgttgacgcgattacttaatttctactaagtgtagatttttttnnnnnnnnnnaagcttggcgtggatccgatatcaactagatcttgagacaaatggcagtattcatccacaattttaaaagaaaaggggggattggggggtacagtgcaggggaaagaatagtagacataatagcaacagacatacaaactaaag

SEQ ID NO: 18010 - DNA, 301 bp, Artificial Sequence
  Kmt2d.3_NTC.38
  crRNA array
  misc_feature (148)..(157): n is a, c, g, or t
cttggctttatatatcttgtggaaaggacgaaacaccgtaatttctactaagtgtagataggaaggggtcaggcgtggataatttctactaagtgtagataacggagcgcgatactaccataatttctactaagtgtagatttttttnnnnnnnnnnaagcttggcgtggatccgatatcaactagatcttgagacaaatggcagtattcatccacaattttaaaagaaaaggggggattggggggtacagtgcaggggaaagaatagtagacataatagcaacagacatacaaactaaag

SEQ ID NO: 18011 - DNA, 301 bp, Artificial Sequence
  Kmt2d.3_NTC.39
  crRNA array
  misc_feature (148)..(157): n is a, c, g, or t
cttggctttatatatcttgtggaaaggacgaaacaccgtaatttctactaagtgtagataggaaggggtcaggcgtggataatttctactaagtgtagatccggacgttataacgtttcttaatttctactaagtgtagatttttttnnnnnnnnnnaagcttggcgtggatccgatatcaactagatcttgagacaaatggcagtattcatccacaattttaaaagaaaaggggggattggggggtacagtgcaggggaaagaatagtagacataatagcaacagacatacaaactaaag

SEQ ID NO: 18012 - DNA, 301 bp, Artificial Sequence
  Kmt2d.3_NTC.4
  crRNA array
  misc_feature (148)..(157): n is a, c, g, or t
cttggctttatatatcttgtggaaaggacgaaacaccgtaatttctactaagtgtagataggaaggggtcaggcgtggataatttctactaagtgtagatatacccgtcgcgaacgtgagtaatttctactaagtgtagatttttttnnnnnnnnnnaagcttggcgtggatccgatatcaactagatcttgagacaaatggcagtattcatccacaattttaaaagaaaaggggggattggggggtacagtgcaggggaaagaatagtagacataatagcaacagacatacaaactaaag

SEQ ID NO: 18013 - DNA, 301 bp, Artificial Sequence
  Kmt2d.3_NTC.40
  crRNA array
  misc_feature (148)..(157): n is a, c, g, or t
cttggctttatatatcttgtggaaaggacgaaacaccgtaatttctactaagtgtagataggaaggggtcaggcgtggataatttctactaagtgtagatattcgcgaacccggccggaataatttctactaagtgtagatttttttnnnnnnnnnnaagcttggcgtggatccgatatcaactagatcttgagacaaatggcagtattcatccacaattttaaaagaaaaggggggattggggggtacagtgcaggggaaagaatagtagacataatagcaacagacatacaaactaaag

SEQ ID NO: 18014 - DNA, 301 bp, Artificial Sequence
  Kmt2d.3_NTC.41
  crRNA array
  misc_feature (148)..(157): n is a, c, g, or t
cttggctttatatatcttgtggaaaggacgaaacaccgtaatttctactaagtgtagataggaaggggtcaggcgtggataatttctactaagtgtagatttgatggcgcgacgcgttattaatttctactaagtgtagatttttttnnnnnnnnnnaagcttggcgtggatccgatatcaactagatcttgagacaaatggcagtattcatccacaattttaaaagaaaaggggggattggggggtacagtgcaggggaaagaatagtagacataatagcaacagacatacaaactaaag

SEQ ID NO: 18015 - DNA, 301 bp, Artificial Sequence
  Kmt2d.3_NTC.42
  crRNA array
  misc_feature (148)..(157): n is a, c, g, or t
cttggctttatatatcttgtggaaaggacgaaacaccgtaatttctactaagtgtagataggaaggggtcaggcgtggataatttctactaagtgtagatggtcaaatcgcggcgataactaatttctactaagtgtagatttttttnnnnnnnnnnaagcttggcgtggatccgatatcaactagatcttgagacaaatggcagtattcatccacaattttaaaagaaaaggggggattggggggtacagtgcaggggaaagaatagtagacataatagcaacagacatacaaactaaag

SEQ ID NO: 18016 - DNA, 301 bp, Artificial Sequence
  Kmt2d.3_NTC.43
  crRNA array
  misc_feature (148)..(157): n is a, c, g, or t
cttggctttatatatcttgtggaaaggacgaaacaccgtaatttctactaagtgtagataggaaggggtcaggcgtggataatttctactaagtgtagatcgactcgcgcattgaactggtaatttctactaagtgtagatttttttnnnnnnnnnnaagcttggcgtggatccgatatcaactagatcttgagacaaatggcagtattcatccacaattttaaaagaaaaggggggattggggggtacagtgcaggggaaagaatagtagacataatagcaacagacatacaaactaaag

SEQ ID NO: 18017 - DNA, 301 bp, Artificial Sequence
  Kmt2d.3_NTC.44
  crRNA array
  misc_feature (148)..(157): n is a, c, g, or t
cttggctttatatatcttgtggaaaggacgaaacaccgtaatttctactaagtgtagataggaaggggtcaggcgtggataatttctactaagtgtagatagcgtcgtacgatttatcgttaatttctactaagtgtagatttttttnnnnnnnnnnaagcttggcgtggatccgatatcaactagatcttgagacaaatggcagtattcatccacaattttaaaagaaaaggggggattggggggtacagtgcaggggaaagaatagtagacataatagcaacagacatacaaactaaag

SEQ ID NO: 18018 - DNA, 301 bp, Artificial Sequence
  Kmt2d.3_NTC.45
  crRNA array
  misc_feature (148)..(157): n is a, c, g, or t
cttggctttatatatcttgtggaaaggacgaaacaccgtaatttctactaagtgtagataggaaggggtcaggcgtggataatttctactaagtgtagatcggaacgcgtgatactagggtaatttctactaagtgtagatttttttnnnnnnnnnnaagcttggcgtggatccgatatcaactagatcttgagacaaatggcagtattcatccacaattttaaaagaaaaggggggattggggggtacagtgcaggggaaagaatagtagacataatagcaacagacatacaaactaaag

SEQ ID NO: 18019 - DNA, 301 bp, Artificial Sequence
  Kmt2d.3_NTC.46
  crRNA array
  misc_feature (148)..(157): n is a, c, g, or t
cttggctttatatatcttgtggaaaggacgaaacaccgtaatttctactaagtgtagataggaaggggtcaggcgtggataatttctactaagtgtagatagcgggtcgtagacgcgcggtaatttctactaagtgtagatttttttnnnnnnnnnnaagcttggcgtggatccgatatcaactagatcttgagacaaatggcagtattcatccacaattttaaaagaaaaggggggattggggggtacagtgcaggggaaagaatagtagacataatagcaacagacatacaaactaaag

SEQ ID NO: 18020 - DNA, 301 bp, Artificial Sequence
  Kmt2d.3_NTC.47
  crRNA array
  misc_feature (148)..(157): n is a, c, g, or t
cttggctttatatatcttgtggaaaggacgaaacaccgtaatttctactaagtgtagataggaaggggtcaggcgtggataatttctactaagtgtagattctcgtatcgcgattgttaataatttctactaagtgtagatttttttnnnnnnnnnnaagcttggcgtggatccgatatcaactagatcttgagacaaatggcagtattcatccacaattttaaaagaaaaggggggattggggggtacagtgcaggggaaagaatagtagacataatagcaacagacatacaaactaaag

SEQ ID NO: 18021 - DNA, 301 bp, Artificial Sequence
  Kmt2d.3_NTC.48
  crRNA array
  misc_feature (148)..(157): n is a, c, g, or t
cttggctttatatatcttgtggaaaggacgaaacaccgtaatttctactaagtgtagataggaaggggtcaggcgtggataatttctactaagtgtagatcggtcgactacggctgttagtaatttctactaagtgtagatttttttnnnnnnnnnnaagcttggcgtggatccgatatcaactagatcttgagacaaatggcagtattcatccacaattttaaaagaaaaggggggattggggggtacagtgcaggggaaagaatagtagacataatagcaacagacatacaaactaaag

SEQ ID NO: 18022 - DNA, 301 bp, Artificial Sequence
  Kmt2d.3_NTC.49
  crRNA array
  misc_feature (148)..(157): n is a, c, g, or t
cttggctttatatatcttgtggaaaggacgaaacaccgtaatttctactaagtgtagataggaaggggtcaggcgtggataatttctactaagtgtagattcggggcgcgtcaactgaattaatttctactaagtgtagatttttttnnnnnnnnnnaagcttggcgtggatccgatatcaactagatcttgagacaaatggcagtattcatccacaattttaaaagaaaaggggggattggggggtacagtgcaggggaaagaatagtagacataatagcaacagacatacaaactaaag

SEQ ID NO: 18023 - DNA, 301 bp, Artificial Sequence
  Kmt2d.3_NTC.5
  crRNA array
  misc_feature (148)..(157): n is a, c, g, or t
cttggctttatatatcttgtggaaaggacgaaacaccgtaatttctactaagtgtagataggaaggggtcaggcgtggataatttctactaagtgtagatgcttacgcgtcgcgaatgtataatttctactaagtgtagatttttttnnnnnnnnnnaagcttggcgtggatccgatatcaactagatcttgagacaaatggcagtattcatccacaattttaaaagaaaaggggggattggggggtacagtgcaggggaaagaatagtagacataatagcaacagacatacaaactaaag

SEQ ID NO: 18024 - DNA, 301 bp, Artificial Sequence
  Kmt2d.3_NTC.50
  crRNA array
  misc_feature (148)..(157): n is a, c, g, or t
cttggctttatatatcttgtggaaaggacgaaacaccgtaatttctactaagtgtagataggaaggggtcaggcgtggataatttctactaagtgtagatattgccgctcgcgcaaaatctaatttctactaagtgtagatttttttnnnnnnnnnnaagcttggcgtggatccgatatcaactagatcttgagacaaatggcagtattcatccacaattttaaaagaaaaggggggattggggggtacagtgcaggggaaagaatagtagacataatagcaacagacatacaaactaaag

SEQ ID NO: 18025 - DNA, 301 bp, Artificial Sequence
  Kmt2d.3_NTC.51
  crRNA array
  misc_feature (148)..(157): n is a, c, g, or t
cttggctttatatatcttgtggaaaggacgaaacaccgtaatttctactaagtgtagataggaaggggtcaggcgtggataatttctactaagtgtagattaacgcgcaacacgccaatgtaatttctactaagtgtagatttttttnnnnnnnnnnaagcttggcgtggatccgatatcaactagatcttgagacaaatggcagtattcatccacaattttaaaagaaaaggggggattggggggtacagtgcaggggaaagaatagtagacataatagcaacagacatacaaactaaag

SEQ ID NO: 18026 - DNA, 301 bp, Artificial Sequence
  Kmt2d.3_NTC.6
  crRNA array
  misc_feature (148)..(157): n is a, c, g, or t
cttggctttatatatcttgtggaaaggacgaaacaccgtaatttctactaagtgtagataggaaggggtcaggcgtggataatttctactaagtgtagatcgaatcgcgcctacgggaattaatttctactaagtgtagatttttttnnnnnnnnnnaagcttggcgtggatccgatatcaactagatcttgagacaaatggcagtattcatccacaattttaaaagaaaaggggggattggggggtacagtgcaggggaaagaatagtagacataatagcaacagacatacaaactaaag

SEQ ID NO: 18027 - DNA, 301 bp, Artificial Sequence
  Kmt2d.3_NTC.7
  crRNA array
  misc_feature (148)..(157): n is a, c, g, or t
cttggctttatatatcttgtggaaaggacgaaacaccgtaatttctactaagtgtagataggaaggggtcaggcgtggataatttctactaagtgtagatcgccgaacggataagactattaatttctactaagtgtagatttttttnnnnnnnnnnaagcttggcgtggatccgatatcaactagatcttgagacaaatggcagtattcatccacaattttaaaagaaaaggggggattggggggtacagtgcaggggaaagaatagtagacataatagcaacagacatacaaactaaag

SEQ ID NO: 18028 - DNA, 301 bp, Artificial Sequence
  Kmt2d.3_NTC.8
  crRNA array
  misc_feature (148)..(157): n is a, c, g, or t
cttggctttatatatcttgtggaaaggacgaaacaccgtaatttctactaagtgtagataggaaggggtcaggcgtggataatttctactaagtgtagatcgaccgaggttacgctgggataatttctactaagtgtagatttttttnnnnnnnnnnaagcttggcgtggatccgatatcaactagatcttgagacaaatggcagtattcatccacaattttaaaagaaaaggggggattggggggtacagtgcaggggaaagaatagtagacataatagcaacagacatacaaactaaag

SEQ ID NO: 18029 - DNA, 301 bp, Artificial Sequence
  Kmt2d.3_NTC.9
  crRNA array
  misc_feature (148)..(157): n is a, c, g, or t
cttggctttatatatcttgtggaaaggacgaaacaccgtaatttctactaagtgtagataggaaggggtcaggcgtggataatttctactaagtgtagatatcgccgtacggctatggcataatttctactaagtgtagatttttttnnnnnnnnnnaagcttggcgtggatccgatatcaactagatcttgagacaaatggcagtattcatccacaattttaaaagaaaaggggggattggggggtacagtgcaggggaaagaatagtagacataatagcaacagacatacaaactaaag

SEQ ID NO: 18030 - DNA, 301 bp, Artificial Sequence
  Kmt2d.4_NTC.0
  crRNA array
  misc_feature (148)..(157): n is a, c, g, or t
cttggctttatatatcttgtggaaaggacgaaacaccgtaatttctactaagtgtagatcccagtcagcgaggaactcctaatttctactaagtgtagattatagcgtcgcgcgctaatttaatttctactaagtgtagatttttttnnnnnnnnnnaagcttggcgtggatccgatatcaactagatcttgagacaaatggcagtattcatccacaattttaaaagaaaaggggggattggggggtacagtgcaggggaaagaatagtagacataatagcaacagacatacaaactaaag

SEQ ID NO: 18031 - DNA, 301 bp, Artificial Sequence
  Kmt2d.4_NTC.1
  crRNA array
  misc_feature (148)..(157): n is a, c, g, or t
cttggctttatatatcttgtggaaaggacgaaacaccgtaatttctactaagtgtagatcccagtcagcgaggaactcctaatttctactaagtgtagatcgcgtaaccgttccggctcctaatttctactaagtgtagatttttttnnnnnnnnnnaagcttggcgtggatccgatatcaactagatcttgagacaaatggcagtattcatccacaattttaaaagaaaaggggggattggggggtacagtgcaggggaaagaatagtagacataatagcaacagacatacaaactaaag

SEQ ID NO: 18032 - DNA, 301 bp, Artificial Sequence
  Kmt2d.4_NTC.10
  crRNA array
  misc_feature (148)..(157): n is a, c, g, or t
cttggctttatatatcttgtggaaaggacgaaacaccgtaatttctactaagtgtagatcccagtcagcgaggaactcctaatttctactaagtgtagatcgctaagttcgcgcgggccgtaatttctactaagtgtagatttttttnnnnnnnnnnaagcttggcgtggatccgatatcaactagatcttgagacaaatggcagtattcatccacaattttaaaagaaaaggggggattggggggtacagtgcaggggaaagaatagtagacataatagcaacagacatacaaactaaag

SEQ ID NO: 18033 - DNA, 301 bp, Artificial Sequence
  Kmt2d.4_NTC.11
  crRNA array
  misc_feature (148)..(157): n is a, c, g, or t
cttggctttatatatcttgtggaaaggacgaaacaccgtaatttctactaagtgtagatcccagtcagcgaggaactcctaatttctactaagtgtagatcgttcgtcgacgaagcaatctaatttctactaagtgtagatttttttnnnnnnnnnnaagcttggcgtggatccgatatcaactagatcttgagacaaatggcagtattcatccacaattttaaaagaaaaggggggattggggggtacagtgcaggggaaagaatagtagacataatagcaacagacatacaaactaaag

SEQ ID NO: 18034 - DNA, 301 bp, Artificial Sequence
  Kmt2d.4_NTC.12
  crRNA array
  misc_feature (148)..(157): n is a, c, g, or t
cttggctttatatatcttgtggaaaggacgaaacaccgtaatttctactaagtgtagatcccagtcagcgaggaactcctaatttctactaagtgtagatcgccgacgattaatcaatagtaatttctactaagtgtagatttttttnnnnnnnnnnaagcttggcgtggatccgatatcaactagatcttgagacaaatggcagtattcatccacaattttaaaagaaaaggggggattggggggtacagtgcaggggaaagaatagtagacataatagcaacagacatacaaactaaag

SEQ ID NO: 18035 - DNA, 301 bp, Artificial Sequence
  Kmt2d.4_NTC.13
  crRNA array
  misc_feature (148)..(157): n is a, c, g, or t
cttggctttatatatcttgtggaaaggacgaaacaccgtaatttctactaagtgtagatcccagtcagcgaggaactcctaatttctactaagtgtagatgaccgttgtatcgcgatcaataatttctactaagtgtagatttttttnnnnnnnnnnaagcttggcgtggatccgatatcaactagatcttgagacaaatggcagtattcatccacaattttaaaagaaaaggggggattggggggtacagtgcaggggaaagaatagtagacataatagcaacagacatacaaactaaag

SEQ ID NO: 18036 - DNA, 301 bp, Artificial Sequence
  Kmt2d.4_NTC.14
  crRNA array
  misc_feature (148)..(157): n is a, c, g, or t
cttggctttatatatcttgtggaaaggacgaaacaccgtaatttctactaagtgtagatcccagtcagcgaggaactcctaatttctactaagtgtagatccgttcgtgcgatagtgttttaatttctactaagtgtagatttttttnnnnnnnnnnaagcttggcgtggatccgatatcaactagatcttgagacaaatggcagtattcatccacaattttaaaagaaaaggggggattggggggtacagtgcaggggaaagaatagtagacataatagcaacagacatacaaactaaag

SEQ ID NO: 18037 - DNA, 301 bp, Artificial Sequence
  Kmt2d.4_NTC.15
  crRNA array
  misc_feature (148)..(157): n is a, c, g, or t
cttggctttatatatcttgtggaaaggacgaaacaccgtaatttctactaagtgtagatcccagtcagcgaggaactcctaatttctactaagtgtagatgttgtcgtgccgcgaatttataatttctactaagtgtagatttttttnnnnnnnnnnaagcttggcgtggatccgatatcaactagatcttgagacaaatggcagtattcatccacaattttaaaagaaaaggggggattggggggtacagtgcaggggaaagaatagtagacataatagcaacagacatacaaactaaag

SEQ ID NO: 18038 - DNA, 301 bp, Artificial Sequence
  Kmt2d.4_NTC.16
  crRNA array
  misc_feature (148)..(157): n is a, c, g, or t
cttggctttatatatcttgtggaaaggacgaaacaccgtaatttctactaagtgtagatcccagtcagcgaggaactcctaatttctactaagtgtagatcggtacgttagacgaaaatttaatttctactaagtgtagatttttttnnnnnnnnnnaagcttggcgtggatccgatatcaactagatcttgagacaaatggcagtattcatccacaattttaaaagaaaaggggggattggggggtacagtgcaggggaaagaatagtagacataatagcaacagacatacaaactaaag

SEQ ID NO: 18039 - DNA, 301 bp, Artificial Sequence
  Kmt2d.4_NTC.17
  crRNA array
  misc_feature (148)..(157): n is a, c, g, or t
cttggctttatatatcttgtggaaaggacgaaacaccgtaatttctactaagtgtagatcccagtcagcgaggaactcctaatttctactaagtgtagattatcgaacgctatcgaacgttaatttctactaagtgtagatttttttnnnnnnnnnnaagcttggcgtggatccgatatcaactagatcttgagacaaatggcagtattcatccacaattttaaaagaaaaggggggattggggggtacagtgcaggggaaagaatagtagacataatagcaacagacatacaaactaaag

SEQ ID NO: 18040 - DNA, 301 bp, Artificial Sequence
  Kmt2d.4_NTC.18
  crRNA array
  misc_feature (148)..(157): n is a, c, g, or t
cttggctttatatatcttgtggaaaggacgaaacaccgtaatttctactaagtgtagatcccagtcagcgaggaactcctaatttctactaagtgtagattccggttacgaccggcaaaataatttctactaagtgtagatttttttnnnnnnnnnnaagcttggcgtggatccgatatcaactagatcttgagacaaatggcagtattcatccacaattttaaaagaaaaggggggattggggggtacagtgcaggggaaagaatagtagacataatagcaacagacatacaaactaaag

SEQ ID NO: 18041 - DNA, 301 bp, Artificial Sequence
  Kmt2d.4_NTC.19
  crRNA array
  misc_feature (148)..(157): n is a, c, g, or t
cttggctttatatatcttgtggaaaggacgaaacaccgtaatttctactaagtgtagatcccagtcagcgaggaactcctaatttctactaagtgtagatcgtcgtagaacgatacccgataatttctactaagtgtagatttttttnnnnnnnnnnaagcttggcgtggatccgatatcaactagatcttgagacaaatggcagtattcatccacaattttaaaagaaaaggggggattggggggtacagtgcaggggaaagaatagtagacataatagcaacagacatacaaactaaag

SEQ ID NO: 18042 - DNA, 301 bp, Artificial Sequence
  Kmt2d.4_NTC.2
  crRNA array
  misc_feature (148)..(157): n is a, c, g, or t
cttggctttatatatcttgtggaaaggacgaaacaccgtaatttctactaagtgtagatcccagtcagcgaggaactcctaatttctactaagtgtagatttatgtcgcgccgcgacccgtaatttctactaagtgtagatttttttnnnnnnnnnnaagcttggcgtggatccgatatcaactagatcttgagacaaatggcagtattcatccacaattttaaaagaaaaggggggattggggggtacagtgcaggggaaagaatagtagacataatagcaacagacatacaaactaaag

SEQ ID NO: 18043 - DNA, 301 bp, Artificial Sequence
  Kmt2d.4_NTC.20
  crRNA array
  misc_feature (148)..(157): n is a, c, g, or t
cttggctttatatatcttgtggaaaggacgaaacaccgtaatttctactaagtgtagatcccagtcagcgaggaactcctaatttctactaagtgtagatattccggcgcgaccagaagataatttctactaagtgtagatttttttnnnnnnnnnnaagcttggcgtggatccgatatcaactagatcttgagacaaatggcagtattcatccacaattttaaaagaaaaggggggattggggggtacagtgcaggggaaagaatagtagacataatagcaacagacatacaaactaaag

SEQ ID NO: 18044 - DNA, 301 bp, Artificial Sequence
  Kmt2d.4_NTC.21
  crRNA array
  misc_feature (148)..(157): n is a, c, g, or t
cttggctttatatatcttgtggaaaggacgaaacaccgtaatttctactaagtgtagatcccagtcagcgaggaactcctaatttctactaagtgtagatgtataacttcgcgcggtccgtaatttctactaagtgtagatttttttnnnnnnnnnnaagcttggcgtggatccgatatcaactagatcttgagacaaatggcagtattcatccacaattttaaaagaaaaggggggattggggggtacagtgcaggggaaagaatagtagacataatagcaacagacatacaaactaaag

SEQ ID NO: 18045 - DNA, 301 bp, Artificial Sequence
  Kmt2d.4_NTC.22
  crRNA array
  misc_feature (148)..(157): n is a, c, g, or t
cttggctttatatatcttgtggaaaggacgaaacaccgtaatttctactaagtgtagatcccagtcagcgaggaactcctaatttctactaagtgtagatgcgcgtcaacgtaatgtgcctaatttctactaagtgtagatttttttnnnnnnnnnnaagcttggcgtggatccgatatcaactagatcttgagacaaatggcagtattcatccacaattttaaaagaaaaggggggattggggggtacagtgcaggggaaagaatagtagacataatagcaacagacatacaaactaaag

SEQ ID NO: 18046 - DNA, 301 bp, Artificial Sequence
  Kmt2d.4_NTC.23
  crRNA array
  misc_feature (148)..(157): n is a, c, g, or t
cttggctttatatatcttgtggaaaggacgaaacaccgtaatttctactaagtgtagatcccagtcagcgaggaactcctaatttctactaagtgtagatacgcgctattatcgtaggtgtaatttctactaagtgtagatttttttnnnnnnnnnnaagcttggcgtggatccgatatcaactagatcttgagacaaatggcagtattcatccacaattttaaaagaaaaggggggattggggggtacagtgcaggggaaagaatagtagacataatagcaacagacatacaaactaaag

SEQ ID NO: 18047 - DNA, 301 bp, Artificial Sequence
  Kmt2d.4_NTC.24
  crRNA array
  misc_feature (148)..(157): n is a, c, g, or t
cttggctttatatatcttgtggaaaggacgaaacaccgtaatttctactaagtgtagatcccagtcagcgaggaactcctaatttctactaagtgtagatactatcgacgttcgtcccggtaatttctactaagtgtagatttttttnnnnnnnnnnaagcttggcgtggatccgatatcaactagatcttgagacaaatggcagtattcatccacaattttaaaagaaaaggggggattggggggtacagtgcaggggaaagaatagtagacataatagcaacagacatacaaactaaag

SEQ ID NO: 18048 - DNA, 301 bp, Artificial Sequence
  Kmt2d.4_NTC.25
  crRNA array
  misc_feature (148)..(157): n is a, c, g, or t
cttggctttatatatcttgtggaaaggacgaaacaccgtaatttctactaagtgtagatcccagtcagcgaggaactcctaatttctactaagtgtagattcgcgttatcgtgccgtgcgtaatttctactaagtgtagatttttttnnnnnnnnnnaagcttggcgtggatccgatatcaactagatcttgagacaaatggcagtattcatccacaattttaaaagaaaaggggggattggggggtacagtgcaggggaaagaatagtagacataatagcaacagacatacaaactaaag

SEQ ID NO: 18049 - DNA, 301 bp, Artificial Sequence
  Kmt2d.4_NTC.26
  crRNA array
  misc_feature (148)..(157): n is a, c, g, or t
cttggctttatatatcttgtggaaaggacgaaacaccgtaatttctactaagtgtagatcccagtcagcgaggaactcctaatttctactaagtgtagatcgcgacggcggttttaacactaatttctactaagtgtagatttttttnnnnnnnnnnaagcttggcgtggatccgatatcaactagatcttgagacaaatggcagtattcatccacaattttaaaagaaaaggggggattggggggtacagtgcaggggaaagaatagtagacataatagcaacagacatacaaactaaag

SEQ ID NO: 18050 - DNA, 301 bp, Artificial Sequence
  Kmt2d.4_NTC.27
  crRNA array
  misc_feature (148)..(157): n is a, c, g, or t
cttggctttatatatcttgtggaaaggacgaaacaccgtaatttctactaagtgtagatcccagtcagcgaggaactcctaatttctactaagtgtagatgtcgcgttgcgaccggcgcttaatttctactaagtgtagatttttttnnnnnnnnnnaagcttggcgtggatccgatatcaactagatcttgagacaaatggcagtattcatccacaattttaaaagaaaaggggggattggggggtacagtgcaggggaaagaatagtagacataatagcaacagacatacaaactaaag

SEQ ID NO: 18051 - DNA, 301 bp, Artificial Sequence
  Kmt2d.4_NTC.28
  crRNA array
  misc_feature (148)..(157): n is a, c, g, or t
cttggctttatatatcttgtggaaaggacgaaacaccgtaatttctactaagtgtagatcccagtcagcgaggaactcctaatttctactaagtgtagataccgctaatcggcgtaaacttaatttctactaagtgtagatttttttnnnnnnnnnnaagcttggcgtggatccgatatcaactagatcttgagacaaatggcagtattcatccacaattttaaaagaaaaggggggattggggggtacagtgcaggggaaagaatagtagacataatagcaacagacatacaaactaaag

SEQ ID NO: 18052 - DNA, 301 bp, Artificial Sequence
  Kmt2d.4_NTC.29
  crRNA array
  misc_feature (148)..(157): n is a, c, g, or t
cttggctttatatatcttgtggaaaggacgaaacaccgtaatttctactaagtgtagatcccagtcagcgaggaactcctaatttctactaagtgtagatcgcgatctataccgtctatataatttctactaagtgtagatttttttnnnnnnnnnnaagcttggcgtggatccgatatcaactagatcttgagacaaatggcagtattcatccacaattttaaaagaaaaggggggattggggggtacagtgcaggggaaagaatagtagacataatagcaacagacatacaaactaaag

SEQ ID NO: 18053 - DNA, 301 bp, Artificial Sequence
  Kmt2d.4_NTC.3
  crRNA array
  misc_feature (148)..(157): n is a, c, g, or t
cttggctttatatatcttgtggaaaggacgaaacaccgtaatttctactaagtgtagatcccagtcagcgaggaactcctaatttctactaagtgtagattcgacgcgagacgacgtacataatttctactaagtgtagatttttttnnnnnnnnnnaagcttggcgtggatccgatatcaactagatcttgagacaaatggcagtattcatccacaattttaaaagaaaaggggggattggggggtacagtgcaggggaaagaatagtagacataatagcaacagacatacaaactaaag

SEQ ID NO: 18054 - DNA, 301 bp, Artificial Sequence
  Kmt2d.4_NTC.30
  crRNA array
  misc_feature (148)..(157): n is a, c, g, or t
cttggctttatatatcttgtggaaaggacgaaacaccgtaatttctactaagtgtagatcccagtcagcgaggaactcctaatttctactaagtgtagatcgatcgtacgggtgtcctaataatttctactaagtgtagatttttttnnnnnnnnnnaagcttggcgtggatccgatatcaactagatcttgagacaaatggcagtattcatccacaattttaaaagaaaaggggggattggggggtacagtgcaggggaaagaatagtagacataatagcaacagacatacaaactaaag

SEQ ID NO: 18055 - DNA, 301 bp, Artificial Sequence
  Kmt2d.4_NTC.31
  crRNA array
  misc_feature (148)..(157): n is a, c, g, or t
cttggctttatatatcttgtggaaaggacgaaacaccgtaatttctactaagtgtagatcccagtcagcgaggaactcctaatttctactaagtgtagatgccgaccgcgtgattgtaggtaatttctactaagtgtagatttttttnnnnnnnnnnaagcttggcgtggatccgatatcaactagatcttgagacaaatggcagtattcatccacaattttaaaagaaaaggggggattggggggtacagtgcaggggaaagaatagtagacataatagcaacagacatacaaactaaag

SEQ ID NO: 18056 - DNA, 301 bp, Artificial Sequence
  Kmt2d.4_NTC.32
  crRNA array
  misc_feature (148)..(157): n is a, c, g, or t
cttggctttatatatcttgtggaaaggacgaaacaccgtaatttctactaagtgtagatcccagtcagcgaggaactcctaatttctactaagtgtagatgcacgttacgcccgggtcactaatttctactaagtgtagatttttttnnnnnnnnnnaagcttggcgtggatccgatatcaactagatcttgagacaaatggcagtattcatccacaattttaaaagaaaaggggggattggggggtacagtgcaggggaaagaatagtagacataatagcaacagacatacaaactaaag

SEQ ID NO: 18057 - DNA, 301 bp, Artificial Sequence
  Kmt2d.4_NTC.33
  crRNA array
  misc_feature (148)..(157): n is a, c, g, or t
cttggctttatatatcttgtggaaaggacgaaacaccgtaatttctactaagtgtagatcccagtcagcgaggaactcctaatttctactaagtgtagattaagcgaccgacgcattcgctaatttctactaagtgtagatttttttnnnnnnnnnnaagcttggcgtggatccgatatcaactagatcttgagacaaatggcagtattcatccacaattttaaaagaaaaggggggattggggggtacagtgcaggggaaagaatagtagacataatagcaacagacatacaaactaaag

SEQ ID NO: 18058 - DNA, 301 bp, Artificial Sequence
  Kmt2d.4_NTC.34
  crRNA array
  misc_feature (148)..(157): n is a, c, g, or t
cttggctttatatatcttgtggaaaggacgaaacaccgtaatttctactaagtgtagatcccagtcagcgaggaactcctaatttctactaagtgtagattagcgttcgacacgtgaaactaatttctactaagtgtagatttttttnnnnnnnnnnaagcttggcgtggatccgatatcaactagatcttgagacaaatggcagtattcatccacaattttaaaagaaaaggggggattggggggtacagtgcaggggaaagaatagtagacataatagcaacagacatacaaactaaag

SEQ ID NO: 18059 - DNA, 301 bp, Artificial Sequence
  Kmt2d.4_NTC.35
  crRNA array
  misc_feature (148)..(157): n is a, c, g, or t
cttggctttatatatcttgtggaaaggacgaaacaccgtaatttctactaagtgtagatcccagtcagcgaggaactcctaatttctactaagtgtagattggcgcgtaatcgctattcgtaatttctactaagtgtagatttttttnnnnnnnnnnaagcttggcgtggatccgatatcaactagatcttgagacaaatggcagtattcatccacaattttaaaagaaaaggggggattggggggtacagtgcaggggaaagaatagtagacataatagcaacagacatacaaactaaag

SEQ ID NO: 18060 - DNA, 301 bp, Artificial Sequence
  Kmt2d.4_NTC.36
  crRNA array
  misc_feature (148)..(157): n is a, c, g, or t
cttggctttatatatcttgtggaaaggacgaaacaccgtaatttctactaagtgtagatcccagtcagcgaggaactcctaatttctactaagtgtagatcaacccgccgtagcgggccttaatttctactaagtgtagatttttttnnnnnnnnnnaagcttggcgtggatccgatatcaactagatcttgagacaaatggcagtattcatccacaattttaaaagaaaaggggggattggggggtacagtgcaggggaaagaatagtagacataatagcaacagacatacaaactaaag

SEQ ID NO: 18061 - DNA, 301 bp, Artificial Sequence
  Kmt2d.4_NTC.37
  crRNA array
  misc_feature (148)..(157): n is a, c, g, or t
cttggctttatatatcttgtggaaaggacgaaacaccgtaatttctactaagtgtagatcccagtcagcgaggaactcctaatttctactaagtgtagattttgcgttgacgcgattacttaatttctactaagtgtagatttttttnnnnnnnnnnaagcttggcgtggatccgatatcaactagatcttgagacaaatggcagtattcatccacaattttaaaagaaaaggggggattggggggtacagtgcaggggaaagaatagtagacataatagcaacagacatacaaactaaag

SEQ ID NO: 18062 - DNA, 301 bp, Artificial Sequence
  Kmt2d.4_NTC.38
  crRNA array
  misc_feature (148)..(157): n is a, c, g, or t
cttggctttatatatcttgtggaaaggacgaaacaccgtaatttctactaagtgtagatcccagtcagcgaggaactcctaatttctactaagtgtagataacggagcgcgatactaccataatttctactaagtgtagatttttttnnnnnnnnnnaagcttggcgtggatccgatatcaactagatcttgagacaaatggcagtattcatccacaattttaaaagaaaaggggggattggggggtacagtgcaggggaaagaatagtagacataatagcaacagacatacaaactaaag

SEQ ID NO: 18063 - DNA, 301 bp, Artificial Sequence
  Kmt2d.4_NTC.39
  crRNA array
  misc_feature (148)..(157): n is a, c, g, or t
cttggctttatatatcttgtggaaaggacgaaacaccgtaatttctactaagtgtagatcccagtcagcgaggaactcctaatttctactaagtgtagatccggacgttataacgtttcttaatttctactaagtgtagatttttttnnnnnnnnnnaagcttggcgtggatccgatatcaactagatcttgagacaaatggcagtattcatccacaattttaaaagaaaaggggggattggggggtacagtgcaggggaaagaatagtagacataatagcaacagacatacaaactaaag

SEQ ID NO: 18064 - DNA, 301 bp, Artificial Sequence
  Kmt2d.4_NTC.4
  crRNA array
  misc_feature (148)..(157): n is a, c, g, or t
cttggctttatatatcttgtggaaaggacgaaacaccgtaatttctactaagtgtagatcccagtcagcgaggaactcctaatttctactaagtgtagatatacccgtcgcgaacgtgagtaatttctactaagtgtagatttttttnnnnnnnnnnaagcttggcgtggatccgatatcaactagatcttgagacaaatggcagtattcatccacaattttaaaagaaaaggggggattggggggtacagtgcaggggaaagaatagtagacataatagcaacagacatacaaactaaag

SEQ ID NO: 18065 - DNA, 301 bp, Artificial Sequence
  Kmt2d.4_NTC.40
  crRNA array
  misc_feature (148)..(157): n is a, c, g, or t
cttggctttatatatcttgtggaaaggacgaaacaccgtaatttctactaagtgtagatcccagtcagcgaggaactcctaatttctactaagtgtagatattcgcgaacccggccggaataatttctactaagtgtagatttttttnnnnnnnnnnaagcttggcgtggatccgatatcaactagatcttgagacaaatggcagtattcatccacaattttaaaagaaaaggggggattggggggtacagtgcaggggaaagaatagtagacataatagcaacagacatacaaactaaag

SEQ ID NO: 18066 - DNA, 301 bp, Artificial Sequence
  Kmt2d.4_NTC.41
  crRNA array
  misc_feature (148)..(157): n is a, c, g, or t
cttggctttatatatcttgtggaaaggacgaaacaccgtaatttctactaagtgtagatcccagtcagcgaggaactcctaatttctactaagtgtagatttgatggcgcgacgcgttattaatttctactaagtgtagatttttttnnnnnnnnnnaagcttggcgtggatccgatatcaactagatcttgagacaaatggcagtattcatccacaattttaaaagaaaaggggggattggggggtacagtgcaggggaaagaatagtagacataatagcaacagacatacaaactaaag

SEQ ID NO: 18067 - DNA, 301 bp, Artificial Sequence
  Kmt2d.4_NTC.42
  crRNA array
  misc_feature (148)..(157): n is a, c, g, or t
cttggctttatatatcttgtggaaaggacgaaacaccgtaatttctactaagtgtagatcccagtcagcgaggaactcctaatttctactaagtgtagatggtcaaatcgcggcgataactaatttctactaagtgtagatttttttnnnnnnnnnnaagcttggcgtggatccgatatcaactagatcttgagacaaatggcagtattcatccacaattttaaaagaaaaggggggattggggggtacagtgcaggggaaagaatagtagacataatagcaacagacatacaaactaaag

SEQ ID NO: 18068 - DNA, 301 bp, Artificial Sequence
  Kmt2d.4_NTC.43
  crRNA array
  misc_feature (148)..(157): n is a, c, g, or t
cttggctttatatatcttgtggaaaggacgaaacaccgtaatttctactaagtgtagatcccagtcagcgaggaactcctaatttctactaagtgtagatcgactcgcgcattgaactggtaatttctactaagtgtagatttttttnnnnnnnnnnaagcttggcgtggatccgatatcaactagatcttgagacaaatggcagtattcatccacaattttaaaagaaaaggggggattggggggtacagtgcaggggaaagaatagtagacataatagcaacagacatacaaactaaag

SEQ ID NO: 18069 - DNA, 301 bp, Artificial Sequence
  Kmt2d.4_NTC.44
  crRNA array
  misc_feature (148)..(157): n is a, c, g, or t
cttggctttatatatcttgtggaaaggacgaaacaccgtaatttctactaagtgtagatcccagtcagcgaggaactcctaatttctactaagtgtagatagcgtcgtacgatttatcgttaatttctactaagtgtagatttttttnnnnnnnnnnaagcttggcgtggatccgatatcaactagatcttgagacaaatggcagtattcatccacaattttaaaagaaaaggggggattggggggtacagtgcaggggaaagaatagtagacataatagcaacagacatacaaactaaag

SEQ ID NO: 18070 - DNA, 301 bp, Artificial Sequence
  Kmt2d.4_NTC.45
  crRNA array
  misc_feature (148)..(157): n is a, c, g, or t
cttggctttatatatcttgtggaaaggacgaaacaccgtaatttctactaagtgtagatcccagtcagcgaggaactcctaatttctactaagtgtagatcggaacgcgtgatactagggtaatttctactaagtgtagatttttttnnnnnnnnnnaagcttggcgtggatccgatatcaactagatcttgagacaaatggcagtattcatccacaattttaaaagaaaaggggggattggggggtacagtgcaggggaaagaatagtagacataatagcaacagacatacaaactaaag

SEQ ID NO: 18071 - DNA, 301 bp, Artificial Sequence
  Kmt2d.4_NTC.46
  crRNA array
  misc_feature (148)..(157): n is a, c, g, or t
cttggctttatatatcttgtggaaaggacgaaacaccgtaatttctactaagtgtagatcccagtcagcgaggaactcctaatttctactaagtgtagatagcgggtcgtagacgcgcggtaatttctactaagtgtagatttttttnnnnnnnnnnaagcttggcgtggatccgatatcaactagatcttgagacaaatggcagtattcatccacaattttaaaagaaaaggggggattggggggtacagtgcaggggaaagaatagtagacataatagcaacagacatacaaactaaag

SEQ ID NO: 18072 - DNA, 301 bp, Artificial Sequence
  Kmt2d.4_NTC.47
  crRNA array
  misc_feature (148)..(157): n is a, c, g, or t
cttggctttatatatcttgtggaaaggacgaaacaccgtaatttctactaagtgtagatcccagtcagcgaggaactcctaatttctactaagtgtagattctcgtatcgcgattgttaataatttctactaagtgtagatttttttnnnnnnnnnnaagcttggcgtggatccgatatcaactagatcttgagacaaatggcagtattcatccacaattttaaaagaaaaggggggattggggggtacagtgcaggggaaagaatagtagacataatagcaacagacatacaaactaaag

SEQ ID NO: 18073 - DNA, 301 bp, Artificial Sequence
  Kmt2d.4_NTC.48
  crRNA array
  misc_feature (148)..(157): n is a, c, g, or t
cttggctttatatatcttgtggaaaggacgaaacaccgtaatttctactaagtgtagatcccagtcagcgaggaactcctaatttctactaagtgtagatcggtcgactacggctgttagtaatttctactaagtgtagatttttttnnnnnnnnnnaagcttggcgtggatccgatatcaactagatcttgagacaaatggcagtattcatccacaattttaaaagaaaaggggggattggggggtacagtgcaggggaaagaatagtagacataatagcaacagacatacaaactaaag

SEQ ID NO: 18074 - DNA, 301 bp, Artificial Sequence
  Kmt2d.4_NTC.49
  crRNA array
  misc_feature (148)..(157): n is a, c, g, or t
cttggctttatatatcttgtggaaaggacgaaacaccgtaatttctactaagtgtagatcccagtcagcgaggaactcctaatttctactaagtgtagattcggggcgcgtcaactgaattaatttctactaagtgtagatttttttnnnnnnnnnnaagcttggcgtggatccgatatcaactagatcttgagacaaatggcagtattcatccacaattttaaaagaaaaggggggattggggggtacagtgcaggggaaagaatagtagacataatagcaacagacatacaaactaaag

SEQ ID NO: 18075 - DNA, 301 bp, Artificial Sequence
  Kmt2d.4_NTC.5
  crRNA array
  misc_feature (148)..(157): n is a, c, g, or t
cttggctttatatatcttgtggaaaggacgaaacaccgtaatttctactaagtgtagatcccagtcagcgaggaactcctaatttctactaagtgtagatgcttacgcgtcgcgaatgtataatttctactaagtgtagatttttttnnnnnnnnnnaagcttggcgtggatccgatatcaactagatcttgagacaaatggcagtattcatccacaattttaaaagaaaaggggggattggggggtacagtgcaggggaaagaatagtagacataatagcaacagacatacaaactaaag

SEQ ID NO: 18076 - DNA, 301 bp, Artificial Sequence
  Kmt2d.4_NTC.50
  crRNA array
  misc_feature (148)..(157): n is a, c, g, or t
cttggctttatatatcttgtggaaaggacgaaacaccgtaatttctactaagtgtagatcccagtcagcgaggaactcctaatttctactaagtgtagatattgccgctcgcgcaaaatctaatttctactaagtgtagatttttttnnnnnnnnnnaagcttggcgtggatccgatatcaactagatcttgagacaaatggcagtattcatccacaattttaaaagaaaaggggggattggggggtacagtgcaggggaaagaatagtagacataatagcaacagacatacaaactaaag

SEQ ID NO: 18077 - DNA, 301 bp, Artificial Sequence
  Kmt2d.4_NTC.51
  crRNA array
  misc_feature (148)..(157): n is a, c, g, or t
cttggctttatatatcttgtggaaaggacgaaacaccgtaatttctactaagtgtagatcccagtcagcgaggaactcctaatttctactaagtgtagattaacgcgcaacacgccaatgtaatttctactaagtgtagatttttttnnnnnnnnnnaagcttggcgtggatccgatatcaactagatcttgagacaaatggcagtattcatccacaattttaaaagaaaaggggggattggggggtacagtgcaggggaaagaatagtagacataatagcaacagacatacaaactaaag

SEQ ID NO: 18078 - DNA, 301 bp, Artificial Sequence
  Kmt2d.4_NTC.6
  crRNA array
  misc_feature (148)..(157): n is a, c, g, or t
cttggctttatatatcttgtggaaaggacgaaacaccgtaatttctactaagtgtagatcccagtcagcgaggaactcctaatttctactaagtgtagatcgaatcgcgcctacgggaattaatttctactaagtgtagatttttttnnnnnnnnnnaagcttggcgtggatccgatatcaactagatcttgagacaaatggcagtattcatccacaattttaaaagaaaaggggggattggggggtacagtgcaggggaaagaatagtagacataatagcaacagacatacaaactaaag

SEQ ID NO: 18079 - DNA, 301 bp, Artificial Sequence
  Kmt2d.4_NTC.7
  crRNA array
  misc_feature (148)..(157): n is a, c, g, or t
cttggctttatatatcttgtggaaaggacgaaacaccgtaatttctactaagtgtagatcccagtcagcgaggaactcctaatttctactaagtgtagatcgccgaacggataagactattaatttctactaagtgtagatttttttnnnnnnnnnnaagcttggcgtggatccgatatcaactagatcttgagacaaatggcagtattcatccacaattttaaaagaaaaggggggattggggggtacagtgcaggggaaagaatagtagacataatagcaacagacatacaaactaaag

SEQ ID NO: 18080 - DNA, 301 bp, Artificial Sequence
  Kmt2d.4_NTC.8
  crRNA array
  misc_feature (148)..(157): n is a, c, g, or t
cttggctttatatatcttgtggaaaggacgaaacaccgtaatttctactaagtgtagatcccagtcagcgaggaactcctaatttctactaagtgtagatcgaccgaggttacgctgggataatttctactaagtgtagatttttttnnnnnnnnnnaagcttggcgtggatccgatatcaactagatcttgagacaaatggcagtattcatccacaattttaaaagaaaaggggggattggggggtacagtgcaggggaaagaatagtagacataatagcaacagacatacaaactaaag

SEQ ID NO: 18081 - DNA, 301 bp, Artificial Sequence
  Kmt2d.4_NTC.9
  crRNA array
  misc_feature (148)..(157): n is a, c, g, or t
cttggctttatatatcttgtggaaaggacgaaacaccgtaatttctactaagtgtagatcccagtcagcgaggaactcctaatttctactaagtgtagatatcgccgtacggctatggcataatttctactaagtgtagatttttttnnnnnnnnnnaagcttggcgtggatccgatatcaactagatcttgagacaaatggcagtattcatccacaattttaaaagaaaaggggggattggggggtacagtgcaggggaaagaatagtagacataatagcaacagacatacaaactaaag

SEQ ID NO: 18082 - DNA, 301 bp, Artificial Sequence
  Nf1.1_NTC.0
  crRNA array
  misc_feature (148)..(157): n is a, c, g, or t
cttggctttatatatcttgtggaaaggacgaaacaccgtaatttctactaagtgtagattggcgatccggaatcctctgtaatttctactaagtgtagattatagcgtcgcgcgctaatttaatttctactaagtgtagatttttttnnnnnnnnnnaagcttggcgtggatccgatatcaactagatcttgagacaaatggcagtattcatccacaattttaaaagaaaaggggggattggggggtacagtgcaggggaaagaatagtagacataatagcaacagacatacaaactaaag

SEQ ID NO: 18083 - DNA, 301 bp, Artificial Sequence
  Nf1.1_NTC.1
  crRNA array
  misc_feature (148)..(157): n is a, c, g, or t
cttggctttatatatcttgtggaaaggacgaaacaccgtaatttctactaagtgtagattggcgatccggaatcctctgtaatttctactaagtgtagatcgcgtaaccgttccggctcctaatttctactaagtgtagatttttttnnnnnnnnnnaagcttggcgtggatccgatatcaactagatcttgagacaaatggcagtattcatccacaattttaaaagaaaaggggggattggggggtacagtgcaggggaaagaatagtagacataatagcaacagacatacaaactaaag

SEQ ID NO: 18084 - DNA, 301 bp, Artificial Sequence
  Nf1.1_NTC.10
  crRNA array
  misc_feature (148)..(157): n is a, c, g, or t
cttggctttatatatcttgtggaaaggacgaaacaccgtaatttctactaagtgtagattggcgatccggaatcctctgtaatttctactaagtgtagatcgctaagttcgcgcgggccgtaatttctactaagtgtagatttttttnnnnnnnnnnaagcttggcgtggatccgatatcaactagatcttgagacaaatggcagtattcatccacaattttaaaagaaaaggggggattggggggtacagtgcaggggaaagaatagtagacataatagcaacagacatacaaactaaag

SEQ ID NO: 18085 - DNA, 301 bp, Artificial Sequence
  Nf1.1_NTC.11
  crRNA array
  misc_feature (148)..(157): n is a, c, g, or t
cttggctttatatatcttgtggaaaggacgaaacaccgtaatttctactaagtgtagattggcgatccggaatcctctgtaatttctactaagtgtagatcgttcgtcgacgaagcaatctaatttctactaagtgtagatttttttnnnnnnnnnnaagcttggcgtggatccgatatcaactagatcttgagacaaatggcagtattcatccacaattttaaaagaaaaggggggattggggggtacagtgcaggggaaagaatagtagacataatagcaacagacatacaaactaaag

SEQ ID NO: 18086 - DNA, 301 bp, Artificial Sequence
  Nf1.1_NTC.12
  crRNA array
  misc_feature (148)..(157): n is a, c, g, or t
cttggctttatatatcttgtggaaaggacgaaacaccgtaatttctactaagtgtagattggcgatccggaatcctctgtaatttctactaagtgtagatcgccgacgattaatcaatagtaatttctactaagtgtagatttttttnnnnnnnnnnaagcttggcgtggatccgatatcaactagatcttgagacaaatggcagtattcatccacaattttaaaagaaaaggggggattggggggtacagtgcaggggaaagaatagtagacataatagcaacagacatacaaactaaag

SEQ ID NO: 18087 - DNA, 301 bp, Artificial Sequence
  Nf1.1_NTC.13
  crRNA array
  misc_feature (148)..(157): n is a, c, g, or t
cttggctttatatatcttgtggaaaggacgaaacaccgtaatttctactaagtgtagattggcgatccggaatcctctgtaatttctactaagtgtagatgaccgttgtatcgcgatcaataatttctactaagtgtagatttttttnnnnnnnnnnaagcttggcgtggatccgatatcaactagatcttgagacaaatggcagtattcatccacaattttaaaagaaaaggggggattggggggtacagtgcaggggaaagaatagtagacataatagcaacagacatacaaactaaag

SEQ ID NO: 18088 - DNA, 301 bp, Artificial Sequence
  Nf1.1_NTC.14
  crRNA array
  misc_feature (148)..(157): n is a, c, g, or t
cttggctttatatatcttgtggaaaggacgaaacaccgtaatttctactaagtgtagattggcgatccggaatcctctgtaatttctactaagtgtagatccgttcgtgcgatagtgttttaatttctactaagtgtagatttttttnnnnnnnnnnaagcttggcgtggatccgatatcaactagatcttgagacaaatggcagtattcatccacaattttaaaagaaaaggggggattggggggtacagtgcaggggaaagaatagtagacataatagcaacagacatacaaactaaag

SEQ ID NO: 18089 - DNA, 301 bp, Artificial Sequence
  Nf1.1_NTC.15
  crRNA array
  misc_feature (148)..(157): n is a, c, g, or t
cttggctttatatatcttgtggaaaggacgaaacaccgtaatttctactaagtgtagattggcgatccggaatcctctgtaatttctactaagtgtagatgttgtcgtgccgcgaatttataatttctactaagtgtagatttttttnnnnnnnnnnaagcttggcgtggatccgatatcaactagatcttgagacaaatggcagtattcatccacaattttaaaagaaaaggggggattggggggtacagtgcaggggaaagaatagtagacataatagcaacagacatacaaactaaag

SEQ ID NO: 18090 - DNA, 301 bp, Artificial Sequence
  Nf1.1_NTC.16
  crRNA array
  misc_feature (148)..(157): n is a, c, g, or t
cttggctttatatatcttgtggaaaggacgaaacaccgtaatttctactaagtgtagattggcgatccggaatcctctgtaatttctactaagtgtagatcggtacgttagacgaaaatttaatttctactaagtgtagatttttttnnnnnnnnnnaagcttggcgtggatccgatatcaactagatcttgagacaaatggcagtattcatccacaattttaaaagaaaaggggggattggggggtacagtgcaggggaaagaatagtagacataatagcaacagacatacaaactaaag

SEQ ID NO: 18091 - DNA, 301 bp, Artificial Sequence
  Nf1.1_NTC.17
  crRNA array
  misc_feature (148)..(157): n is a, c, g, or t
cttggctttatatatcttgtggaaaggacgaaacaccgtaatttctactaagtgtagattggcgatccggaatcctctgtaatttctactaagtgtagattatcgaacgctatcgaacgttaatttctactaagtgtagatttttttnnnnnnnnnnaagcttggcgtggatccgatatcaactagatcttgagacaaatggcagtattcatccacaattttaaaagaaaaggggggattggggggtacagtgcaggggaaagaatagtagacataatagcaacagacatacaaactaaag

SEQ ID NO: 18092 - DNA, 301 bp, Artificial Sequence
  Nf1.1_NTC.18
  crRNA array
  misc_feature (148)..(157): n is a, c, g, or t
cttggctttatatatcttgtggaaaggacgaaacaccgtaatttctactaagtgtagattggcgatccggaatcctctgtaatttctactaagtgtagattccggttacgaccggcaaaataatttctactaagtgtagatttttttnnnnnnnnnnaagcttggcgtggatccgatatcaactagatcttgagacaaatggcagtattcatccacaattttaaaagaaaaggggggattggggggtacagtgcaggggaaagaatagtagacataatagcaacagacatacaaactaaag

SEQ ID NO: 18093 - DNA, 301 bp, Artificial Sequence
  Nf1.1_NTC.19
  crRNA array
  misc_feature (148)..(157): n is a, c, g, or t
cttggctttatatatcttgtggaaaggacgaaacaccgtaatttctactaagtgtagattggcgatccggaatcctctgtaatttctactaagtgtagatcgtcgtagaacgatacccgataatttctactaagtgtagatttttttnnnnnnnnnnaagcttggcgtggatccgatatcaactagatcttgagacaaatggcagtattcatccacaattttaaaagaaaaggggggattggggggtacagtgcaggggaaagaatagtagacataatagcaacagacatacaaactaaag

SEQ ID NO: 18094 - DNA, 301 bp, Artificial Sequence
  Nf1.1_NTC.2
  crRNA array
  misc_feature (148)..(157): n is a, c, g, or t
cttggctttatatatcttgtggaaaggacgaaacaccgtaatttctactaagtgtagattggcgatccggaatcctctgtaatttctactaagtgtagatttatgtcgcgccgcgacccgtaatttctactaagtgtagatttttttnnnnnnnnnnaagcttggcgtggatccgatatcaactagatcttgagacaaatggcagtattcatccacaattttaaaagaaaaggggggattggggggtacagtgcaggggaaagaatagtagacataatagcaacagacatacaaactaaag

SEQ ID NO: 18095 - DNA, 301 bp, Artificial Sequence
  Nf1.1_NTC.20
  crRNA array
  misc_feature (148)..(157): n is a, c, g, or t
cttggctttatatatcttgtggaaaggacgaaacaccgtaatttctactaagtgtagattggcgatccggaatcctctgtaatttctactaagtgtagatattccggcgcgaccagaagataatttctactaagtgtagatttttttnnnnnnnnnnaagcttggcgtggatccgatatcaactagatcttgagacaaatggcagtattcatccacaattttaaaagaaaaggggggattggggggtacagtgcaggggaaagaatagtagacataatagcaacagacatacaaactaaag

SEQ ID NO: 18096 - DNA, 301 bp, Artificial Sequence
  Nf1.1_NTC.21
  crRNA array
  misc_feature (148)..(157): n is a, c, g, or t
cttggctttatatatcttgtggaaaggacgaaacaccgtaatttctactaagtgtagattggcgatccggaatcctctgtaatttctactaagtgtagatgtataacttcgcgcggtccgtaatttctactaagtgtagatttttttnnnnnnnnnnaagcttggcgtggatccgatatcaactagatcttgagacaaatggcagtattcatccacaattttaaaagaaaaggggggattggggggtacagtgcaggggaaagaatagtagacataatagcaacagacatacaaactaaag

SEQ ID NO: 18097 - DNA, 301 bp, Artificial Sequence
  Nf1.1_NTC.22
  crRNA array
  misc_feature (148)..(157): n is a, c, g, or t
cttggctttatatatcttgtggaaaggacgaaacaccgtaatttctactaagtgtagattggcgatccggaatcctctgtaatttctactaagtgtagatgcgcgtcaacgtaatgtgcctaatttctactaagtgtagatttttttnnnnnnnnnnaagcttggcgtggatccgatatcaactagatcttgagacaaatggcagtattcatccacaattttaaaagaaaaggggggattggggggtacagtgcaggggaaagaatagtagacataatagcaacagacatacaaactaaag

SEQ ID NO: 18098 - DNA, 301 bp, Artificial Sequence
  Nf1.1_NTC.23
  crRNA array
  misc_feature (148)..(157): n is a, c, g, or t
cttggctttatatatcttgtggaaaggacgaaacaccgtaatttctactaagtgtagattggcgatccggaatcctctgtaatttctactaagtgtagatacgcgctattatcgtaggtgtaatttctactaagtgtagatttttttnnnnnnnnnnaagcttggcgtggatccgatatcaactagatcttgagacaaatggcagtattcatccacaattttaaaagaaaaggggggattggggggtacagtgcaggggaaagaatagtagacataatagcaacagacatacaaactaaag

SEQ ID NO: 18099 - DNA, 301 bp, Artificial Sequence
  Nf1.1_NTC.24
  crRNA array
  misc_feature (148)..(157): n is a, c, g, or t
cttggctttatatatcttgtggaaaggacgaaacaccgtaatttctactaagtgtagattggcgatccggaatcctctgtaatttctactaagtgtagatactatcgacgttcgtcccggtaatttctactaagtgtagatttttttnnnnnnnnnnaagcttggcgtggatccgatatcaactagatcttgagacaaatggcagtattcatccacaattttaaaagaaaaggggggattggggggtacagtgcaggggaaagaatagtagacataatagcaacagacatacaaactaaag

SEQ ID NO: 18100 - DNA, 301 bp, Artificial Sequence
  Nf1.1_NTC.25
  crRNA array
  misc_feature (148)..(157): n is a, c, g, or t
cttggctttatatatcttgtggaaaggacgaaacaccgtaatttctactaagtgtagattggcgatccggaatcctctgtaatttctactaagtgtagattcgcgttatcgtgccgtgcgtaatttctactaagtgtagatttttttnnnnnnnnnnaagcttggcgtggatccgatatcaactagatcttgagacaaatggcagtattcatccacaattttaaaagaaaaggggggattggggggtacagtgcaggggaaagaatagtagacataatagcaacagacatacaaactaaag

SEQ ID NO: 18101 - DNA, 301 bp, Artificial Sequence
  Nf1.1_NTC.26
  crRNA array
  misc_feature (148)..(157): n is a, c, g, or t
cttggctttatatatcttgtggaaaggacgaaacaccgtaatttctactaagtgtagattggcgatccggaatcctctgtaatttctactaagtgtagatcgcgacggcggttttaacactaatttctactaagtgtagatttttttnnnnnnnnnnaagcttggcgtggatccgatatcaactagatcttgagacaaatggcagtattcatccacaattttaaaagaaaaggggggattggggggtacagtgcaggggaaagaatagtagacataatagcaacagacatacaaactaaag

SEQ ID NO: 18102 - DNA, 301 bp, Artificial Sequence
  Nf1.1_NTC.27
  crRNA array
  misc_feature (148)..(157): n is a, c, g, or t
cttggctttatatatcttgtggaaaggacgaaacaccgtaatttctactaagtgtagattggcgatccggaatcctctgtaatttctactaagtgtagatgtcgcgttgcgaccggcgcttaatttctactaagtgtagatttttttnnnnnnnnnnaagcttggcgtggatccgatatcaactagatcttgagacaaatggcagtattcatccacaattttaaaagaaaaggggggattggggggtacagtgcaggggaaagaatagtagacataatagcaacagacatacaaactaaag

SEQ ID NO: 18103 - DNA, 301 bp, Artificial Sequence
  Nf1.1_NTC.28
  crRNA array
  misc_feature (148)..(157): n is a, c, g, or t
cttggctttatatatcttgtggaaaggacgaaacaccgtaatttctactaagtgtagattggcgatccggaatcctctgtaatttctactaagtgtagataccgctaatcggcgtaaacttaatttctactaagtgtagatttttttnnnnnnnnnnaagcttggcgtggatccgatatcaactagatcttgagacaaatggcagtattcatccacaattttaaaagaaaaggggggattggggggtacagtgcaggggaaagaatagtagacataatagcaacagacatacaaactaaag

SEQ ID NO: 18104 - DNA, 301 bp, Artificial Sequence
  Nf1.1_NTC.29
  crRNA array
  misc_feature (148)..(157): n is a, c, g, or t
cttggctttatatatcttgtggaaaggacgaaacaccgtaatttctactaagtgtagattggcgatccggaatcctctgtaatttctactaagtgtagatcgcgatctataccgtctatataatttctactaagtgtagatttttttnnnnnnnnnnaagcttggcgtggatccgatatcaactagatcttgagacaaatggcagtattcatccacaattttaaaagaaaaggggggattggggggtacagtgcaggggaaagaatagtagacataatagcaacagacatacaaactaaag

SEQ ID NO: 18105 - DNA, 301 bp, Artificial Sequence
  Nf1.1_NTC.3
  crRNA array
  misc_feature (148)..(157): n is a, c, g, or t
cttggctttatatatcttgtggaaaggacgaaacaccgtaatttctactaagtgtagattggcgatccggaatcctctgtaatttctactaagtgtagattcgacgcgagacgacgtacataatttctactaagtgtagatttttttnnnnnnnnnnaagcttggcgtggatccgatatcaactagatcttgagacaaatggcagtattcatccacaattttaaaagaaaaggggggattggggggtacagtgcaggggaaagaatagtagacataatagcaacagacatacaaactaaag

SEQ ID NO: 18106 - DNA, 301 bp, Artificial Sequence
  Nf1.1_NTC.30
  crRNA array
  misc_feature (148)..(157): n is a, c, g, or t
cttggctttatatatcttgtggaaaggacgaaacaccgtaatttctactaagtgtagattggcgatccggaatcctctgtaatttctactaagtgtagatcgatcgtacgggtgtcctaataatttctactaagtgtagatttttttnnnnnnnnnnaagcttggcgtggatccgatatcaactagatcttgagacaaatggcagtattcatccacaattttaaaagaaaaggggggattggggggtacagtgcaggggaaagaatagtagacataatagcaacagacatacaaactaaag

SEQ ID NO: 18107 - DNA, 301 bp, Artificial Sequence
  Nf1.1_NTC.31
  crRNA array
  misc_feature (148)..(157): n is a, c, g, or t
cttggctttatatatcttgtggaaaggacgaaacaccgtaatttctactaagtgtagattggcgatccggaatcctctgtaatttctactaagtgtagatgccgaccgcgtgattgtaggtaatttctactaagtgtagatttttttnnnnnnnnnnaagcttggcgtggatccgatatcaactagatcttgagacaaatggcagtattcatccacaattttaaaagaaaaggggggattggggggtacagtgcaggggaaagaatagtagacataatagcaacagacatacaaactaaag

SEQ ID NO: 18108 - DNA, 301 bp, Artificial Sequence
  Nf1.1_NTC.32
  crRNA array
  misc_feature (148)..(157): n is a, c, g, or t
cttggctttatatatcttgtggaaaggacgaaacaccgtaatttctactaagtgtagattggcgatccggaatcctctgtaatttctactaagtgtagatgcacgttacgcccgggtcactaatttctactaagtgtagatttttttnnnnnnnnnnaagcttggcgtggatccgatatcaactagatcttgagacaaatggcagtattcatccacaattttaaaagaaaaggggggattggggggtacagtgcaggggaaagaatagtagacataatagcaacagacatacaaactaaag

SEQ ID NO: 18109 - DNA, 301 bp, Artificial Sequence
  Nf1.1_NTC.33
  crRNA array
  misc_feature (148)..(157): n is a, c, g, or t
cttggctttatatatcttgtggaaaggacgaaacaccgtaatttctactaagtgtagattggcgatccggaatcctctgtaatttctactaagtgtagattaagcgaccgacgcattcgctaatttctactaagtgtagatttttttnnnnnnnnnnaagcttggcgtggatccgatatcaactagatcttgagacaaatggcagtattcatccacaattttaaaagaaaaggggggattggggggtacagtgcaggggaaagaatagtagacataatagcaacagacatacaaactaaag

SEQ ID NO: 18110 - DNA, 301 bp, Artificial Sequence
  Nf1.1_NTC.34
  crRNA array
  misc_feature (148)..(157): n is a, c, g, or t
cttggctttatatatcttgtggaaaggacgaaacaccgtaatttctactaagtgtagattggcgatccggaatcctctgtaatttctactaagtgtagattagcgttcgacacgtgaaactaatttctactaagtgtagatttttttnnnnnnnnnnaagcttggcgtggatccgatatcaactagatcttgagacaaatggcagtattcatccacaattttaaaagaaaaggggggattggggggtacagtgcaggggaaagaatagtagacataatagcaacagacatacaaactaaag

SEQ ID NO: 18111 - DNA, 301 bp, Artificial Sequence
  Nf1.1_NTC.35
  crRNA array
  misc_feature (148)..(157): n is a, c, g, or t
cttggctttatatatcttgtggaaaggacgaaacaccgtaatttctactaagtgtagattggcgatccggaatcctctgtaatttctactaagtgtagattggcgcgtaatcgctattcgtaatttctactaagtgtagatttttttnnnnnnnnnnaagcttggcgtggatccgatatcaactagatcttgagacaaatggcagtattcatccacaattttaaaagaaaaggggggattggggggtacagtgcaggggaaagaatagtagacataatagcaacagacatacaaactaaag

SEQ ID NO: 18112 - DNA, 301 bp, Artificial Sequence
  Nf1.1_NTC.36
  crRNA array
  misc_feature (148)..(157): n is a, c, g, or t
cttggctttatatatcttgtggaaaggacgaaacaccgtaatttctactaagtgtagattggcgatccggaatcctctgtaatttctactaagtgtagatcaacccgccgtagcgggccttaatttctactaagtgtagatttttttnnnnnnnnnnaagcttggcgtggatccgatatcaactagatcttgagacaaatggcagtattcatccacaattttaaaagaaaaggggggattggggggtacagtgcaggggaaagaatagtagacataatagcaacagacatacaaactaaag

SEQ ID NO: 18113 - DNA, 301 bp, Artificial Sequence
  Nf1.1_NTC.37
  crRNA array
  misc_feature (148)..(157): n is a, c, g, or t
cttggctttatatatcttgtggaaaggacgaaacaccgtaatttctactaagtgtagattggcgatccggaatcctctgtaatttctactaagtgtagattttgcgttgacgcgattacttaatttctactaagtgtagatttttttnnnnnnnnnnaagcttggcgtggatccgatatcaactagatcttgagacaaatggcagtattcatccacaattttaaaagaaaaggggggattggggggtacagtgcaggggaaagaatagtagacataatagcaacagacatacaaactaaag

SEQ ID NO: 18114 - DNA, 301 bp, Artificial Sequence
  Nf1.1_NTC.38
  crRNA array
  misc_feature (148)..(157): n is a, c, g, or t
cttggctttatatatcttgtggaaaggacgaaacaccgtaatttctactaagtgtagattggcgatccggaatcctctgtaatttctactaagtgtagataacggagcgcgatactaccataatttctactaagtgtagatttttttnnnnnnnnnnaagcttggcgtggatccgatatcaactagatcttgagacaaatggcagtattcatccacaattttaaaagaaaaggggggattggggggtacagtgcaggggaaagaatagtagacataatagcaacagacatacaaactaaag

SEQ ID NO: 18115 - DNA, 301 bp, Artificial Sequence
  Nf1.1_NTC.39
  crRNA array
  misc_feature (148)..(157): n is a, c, g, or t
cttggctttatatatcttgtggaaaggacgaaacaccgtaatttctactaagtgtagattggcgatccggaatcctctgtaatttctactaagtgtagatccggacgttataacgtttcttaatttctactaagtgtagatttttttnnnnnnnnnnaagcttggcgtggatccgatatcaactagatcttgagacaaatggcagtattcatccacaattttaaaagaaaaggggggattggggggtacagtgcaggggaaagaatagtagacataatagcaacagacatacaaactaaag

SEQ ID NO: 18116 - DNA, 301 bp, Artificial Sequence
  Nf1.1_NTC.4
  crRNA array
  misc_feature (148)..(157): n is a, c, g, or t
cttggctttatatatcttgtggaaaggacgaaacaccgtaatttctactaagtgtagattggcgatccggaatcctctgtaatttctactaagtgtagatatacccgtcgcgaacgtgagtaatttctactaagtgtagatttttttnnnnnnnnnnaagcttggcgtggatccgatatcaactagatcttgagacaaatggcagtattcatccacaattttaaaagaaaaggggggattggggggtacagtgcaggggaaagaatagtagacataatagcaacagacatacaaactaaag

SEQ ID NO: 18117 - DNA, 301 bp, Artificial Sequence
  Nf1.1_NTC.40
  crRNA array
  misc_feature (148)..(157): n is a, c, g, or t
cttggctttatatatcttgtggaaaggacgaaacaccgtaatttctactaagtgtagattggcgatccggaatcctctgtaatttctactaagtgtagatattcgcgaacccggccggaataatttctactaagtgtagatttttttnnnnnnnnnnaagcttggcgtggatccgatatcaactagatcttgagacaaatggcagtattcatccacaattttaaaagaaaaggggggattggggggtacagtgcaggggaaagaatagtagacataatagcaacagacatacaaactaaag

SEQ ID NO: 18118 - DNA, 301 bp, Artificial Sequence
  Nf1.1_NTC.41
  crRNA array
  misc_feature (148)..(157): n is a, c, g, or t
cttggctttatatatcttgtggaaaggacgaaacaccgtaatttctactaagtgtagattggcgatccggaatcctctgtaatttctactaagtgtagatttgatggcgcgacgcgttattaatttctactaagtgtagatttttttnnnnnnnnnnaagcttggcgtggatccgatatcaactagatcttgagacaaatggcagtattcatccacaattttaaaagaaaaggggggattggggggtacagtgcaggggaaagaatagtagacataatagcaacagacatacaaactaaag

SEQ ID NO: 18119 - DNA, 301 bp, Artificial Sequence
  Nf1.1_NTC.42
  crRNA array
  misc_feature (148)..(157): n is a, c, g, or t
cttggctttatatatcttgtggaaaggacgaaacaccgtaatttctactaagtgtagattggcgatccggaatcctctgtaatttctactaagtgtagatggtcaaatcgcggcgataactaatttctactaagtgtagatttttttnnnnnnnnnnaagcttggcgtggatccgatatcaactagatcttgagacaaatggcagtattcatccacaattttaaaagaaaaggggggattggggggtacagtgcaggggaaagaatagtagacataatagcaacagacatacaaactaaag

SEQ ID NO: 18120 - DNA, 301 bp, Artificial Sequence
  Nf1.1_NTC.43
  crRNA array
  misc_feature (148)..(157): n is a, c, g, or t
cttggctttatatatcttgtggaaaggacgaaacaccgtaatttctactaagtgtagattggcgatccggaatcctctgtaatttctactaagtgtagatcgactcgcgcattgaactggtaatttctactaagtgtagatttttttnnnnnnnnnnaagcttggcgtggatccgatatcaactagatcttgagacaaatggcagtattcatccacaattttaaaagaaaaggggggattggggggtacagtgcaggggaaagaatagtagacataatagcaacagacatacaaactaaag

SEQ ID NO: 18121 - DNA, 301 bp, Artificial Sequence
  Nf1.1_NTC.44
  crRNA array
  misc_feature (148)..(157): n is a, c, g, or t
cttggctttatatatcttgtggaaaggacgaaacaccgtaatttctactaagtgtagattggcgatccggaatcctctgtaatttctactaagtgtagatagcgtcgtacgatttatcgttaatttctactaagtgtagatttttttnnnnnnnnnnaagcttggcgtggatccgatatcaactagatcttgagacaaatggcagtattcatccacaattttaaaagaaaaggggggattggggggtacagtgcaggggaaagaatagtagacataatagcaacagacatacaaactaaag

SEQ ID NO: 18122 - DNA, 301 bp, Artificial Sequence
  Nf1.1_NTC.45
  crRNA array
  misc_feature (148)..(157): n is a, c, g, or t
cttggctttatatatcttgtggaaaggacgaaacaccgtaatttctactaagtgtagattggcgatccggaatcctctgtaatttctactaagtgtagatcggaacgcgtgatactagggtaatttctactaagtgtagatttttttnnnnnnnnnnaagcttggcgtggatccgatatcaactagatcttgagacaaatggcagtattcatccacaattttaaaagaaaaggggggattggggggtacagtgcaggggaaagaatagtagacataatagcaacagacatacaaactaaag

SEQ ID NO: 18123 - DNA, 301 bp, Artificial Sequence
  Nf1.1_NTC.46
  crRNA array
  misc_feature (148)..(157): n is a, c, g, or t
cttggctttatatatcttgtggaaaggacgaaacaccgtaatttctactaagtgtagattggcgatccggaatcctctgtaatttctactaagtgtagatagcgggtcgtagacgcgcggtaatttctactaagtgtagatttttttnnnnnnnnnnaagcttggcgtggatccgatatcaactagatcttgagacaaatggcagtattcatccacaattttaaaagaaaaggggggattggggggtacagtgcaggggaaagaatagtagacataatagcaacagacatacaaactaaag

SEQ ID NO: 18124 - DNA, 301 bp, Artificial Sequence
  Nf1.1_NTC.47
  crRNA array
  misc_feature (148)..(157): n is a, c, g, or t
cttggctttatatatcttgtggaaaggacgaaacaccgtaatttctactaagtgtagattggcgatccggaatcctctgtaatttctactaagtgtagattctcgtatcgcgattgttaataatttctactaagtgtagatttttttnnnnnnnnnnaagcttggcgtggatccgatatcaactagatcttgagacaaatggcagtattcatccacaattttaaaagaaaaggggggattggggggtacagtgcaggggaaagaatagtagacataatagcaacagacatacaaactaaag

SEQ ID NO: 18125 - DNA, 301 bp, Artificial Sequence
  Nf1.1_NTC.48
  crRNA array
  misc_feature (148)..(157): n is a, c, g, or t
cttggctttatatatcttgtggaaaggacgaaacaccgtaatttctactaagtgtagattggcgatccggaatcctctgtaatttctactaagtgtagatcggtcgactacggctgttagtaatttctactaagtgtagatttttttnnnnnnnnnnaagcttggcgtggatccgatatcaactagatcttgagacaaatggcagtattcatccacaattttaaaagaaaaggggggattggggggtacagtgcaggggaaagaatagtagacataatagcaacagacatacaaactaaag

SEQ ID NO: 18126 - DNA, 301 bp, Artificial Sequence
  Nf1.1_NTC.49
  crRNA array
  misc_feature (148)..(157): n is a, c, g, or t
cttggctttatatatcttgtggaaaggacgaaacaccgtaatttctactaagtgtagattggcgatccggaatcctctgtaatttctactaagtgtagattcggggcgcgtcaactgaattaatttctactaagtgtagatttttttnnnnnnnnnnaagcttggcgtggatccgatatcaactagatcttgagacaaatggcagtattcatccacaattttaaaagaaaaggggggattggggggtacagtgcaggggaaagaatagtagacataatagcaacagacatacaaactaaag

SEQ ID NO: 18127 - DNA, 301 bp, Artificial Sequence
  Nf1.1_NTC.5
  crRNA array
  misc_feature (148)..(157): n is a, c, g, or t
cttggctttatatatcttgtggaaaggacgaaacaccgtaatttctactaagtgtagattggcgatccggaatcctctgtaatttctactaagtgtagatgcttacgcgtcgcgaatgtataatttctactaagtgtagatttttttnnnnnnnnnnaagcttggcgtggatccgatatcaactagatcttgagacaaatggcagtattcatccacaattttaaaagaaaaggggggattggggggtacagtgcaggggaaagaatagtagacataatagcaacagacatacaaactaaag

SEQ ID NO: 18128 - DNA, 301 bp, Artificial Sequence
  Nf1.1_NTC.50
  crRNA array
  misc_feature (148)..(157): n is a, c, g, or t
cttggctttatatatcttgtggaaaggacgaaacaccgtaatttctactaagtgtagattggcgatccggaatcctctgtaatttctactaagtgtagatattgccgctcgcgcaaaatctaatttctactaagtgtagatttttttnnnnnnnnnnaagcttggcgtggatccgatatcaactagatcttgagacaaatggcagtattcatccacaattttaaaagaaaaggggggattggggggtacagtgcaggggaaagaatagtagacataatagcaacagacatacaaactaaag

SEQ ID NO: 18129 - DNA, 301 bp, Artificial Sequence
  Nf1.1_NTC.51
  crRNA array
  misc_feature (148)..(157): n is a, c, g, or t
cttggctttatatatcttgtggaaaggacgaaacaccgtaatttctactaagtgtagattggcgatccggaatcctctgtaatttctactaagtgtagattaacgcgcaacacgccaatgtaatttctactaagtgtagatttttttnnnnnnnnnnaagcttggcgtggatccgatatcaactagatcttgagacaaatggcagtattcatccacaattttaaaagaaaaggggggattggggggtacagtgcaggggaaagaatagtagacataatagcaacagacatacaaactaaag

SEQ ID NO: 18130 - DNA, 301 bp, Artificial Sequence
  Nf1.1_NTC.6
  crRNA array
  misc_feature (148)..(157): n is a, c, g, or t
cttggctttatatatcttgtggaaaggacgaaacaccgtaatttctactaagtgtagattggcgatccggaatcctctgtaatttctactaagtgtagatcgaatcgcgcctacgggaattaatttctactaagtgtagatttttttnnnnnnnnnnaagcttggcgtggatccgatatcaactagatcttgagacaaatggcagtattcatccacaattttaaaagaaaaggggggattggggggtacagtgcaggggaaagaatagtagacataatagcaacagacatacaaactaaag

SEQ ID NO: 18131 - DNA, 301 bp, Artificial Sequence
  Nf1.1_NTC.7
  crRNA array
  misc_feature (148)..(157): n is a, c, g, or t
cttggctttatatatcttgtggaaaggacgaaacaccgtaatttctactaagtgtagattggcgatccggaatcctctgtaatttctactaagtgtagatcgccgaacggataagactattaatttctactaagtgtagatttttttnnnnnnnnnnaagcttggcgtggatccgatatcaactagatcttgagacaaatggcagtattcatccacaattttaaaagaaaaggggggattggggggtacagtgcaggggaaagaatagtagacataatagcaacagacatacaaactaaag

SEQ ID NO: 18132 - DNA, 301 bp, Artificial Sequence
  Nf1.1_NTC.8
  crRNA array
  misc_feature (148)..(157): n is a, c, g, or t
cttggctttatatatcttgtggaaaggacgaaacaccgtaatttctactaagtgtagattggcgatccggaatcctctgtaatttctactaagtgtagatcgaccgaggttacgctgggataatttctactaagtgtagatttttttnnnnnnnnnnaagcttggcgtggatccgatatcaactagatcttgagacaaatggcagtattcatccacaattttaaaagaaaaggggggattggggggtacagtgcaggggaaagaatagtagacataatagcaacagacatacaaactaaag

SEQ ID NO: 18133 - DNA, 301 bp, Artificial Sequence
  Nf1.1_NTC.9
  crRNA array
  misc_feature (148)..(157): n is a, c, g, or t
cttggctttatatatcttgtggaaaggacgaaacaccgtaatttctactaagtgtagattggcgatccggaatcctctgtaatttctactaagtgtagatatcgccgtacggctatggcataatttctactaagtgtagatttttttnnnnnnnnnnaagcttggcgtggatccgatatcaactagatcttgagacaaatggcagtattcatccacaattttaaaagaaaaggggggattggggggtacagtgcaggggaaagaatagtagacataatagcaacagacatacaaactaaag

SEQ ID NO: 18134 - DNA, 301 bp, Artificial Sequence
  Nf1.2_NTC.0
  crRNA array
  misc_feature (148)..(157): n is a, c, g, or t
cttggctttatatatcttgtggaaaggacgaaacaccgtaatttctactaagtgtagatggaaacacaacgctggcctctaatttctactaagtgtagattatagcgtcgcgcgctaatttaatttctactaagtgtagatttttttnnnnnnnnnnaagcttggcgtggatccgatatcaactagatcttgagacaaatggcagtattcatccacaattttaaaagaaaaggggggattggggggtacagtgcaggggaaagaatagtagacataatagcaacagacatacaaactaaag

SEQ ID NO: 18135 - DNA, 301 bp, Artificial Sequence
  Nf1.2_NTC.1
  crRNA array
  misc_feature (148)..(157): n is a, c, g, or t
cttggctttatatatcttgtggaaaggacgaaacaccgtaatttctactaagtgtagatggaaacacaacgctggcctctaatttctactaagtgtagatcgcgtaaccgttccggctcctaatttctactaagtgtagatttttttnnnnnnnnnnaagcttggcgtggatccgatatcaactagatcttgagacaaatggcagtattcatccacaattttaaaagaaaaggggggattggggggtacagtgcaggggaaagaatagtagacataatagcaacagacatacaaactaaag

SEQ ID NO: 18136 - DNA, 301 bp, Artificial Sequence
  Nf1.2_NTC.10
  crRNA array
  misc_feature (148)..(157): n is a, c, g, or t
cttggctttatatatcttgtggaaaggacgaaacaccgtaatttctactaagtgtagatggaaacacaacgctggcctctaatttctactaagtgtagatcgctaagttcgcgcgggccgtaatttctactaagtgtagatttttttnnnnnnnnnnaagcttggcgtggatccgatatcaactagatcttgagacaaatggcagtattcatccacaattttaaaagaaaaggggggattggggggtacagtgcaggggaaagaatagtagacataatagcaacagacatacaaactaaag

SEQ ID NO: 18137 - DNA, 301 bp, Artificial Sequence
  Nf1.2_NTC.11
  crRNA array
  misc_feature (148)..(157): n is a, c, g, or t
cttggctttatatatcttgtggaaaggacgaaacaccgtaatttctactaagtgtagatggaaacacaacgctggcctctaatttctactaagtgtagatcgttcgtcgacgaagcaatctaatttctactaagtgtagatttttttnnnnnnnnnnaagcttggcgtggatccgatatcaactagatcttgagacaaatggcagtattcatccacaattttaaaagaaaaggggggattggggggtacagtgcaggggaaagaatagtagacataatagcaacagacatacaaactaaag

SEQ ID NO: 18138 - DNA, 301 bp, Artificial Sequence
  Nf1.2_NTC.12
  crRNA array
  misc_feature (148)..(157): n is a, c, g, or t
cttggctttatatatcttgtggaaaggacgaaacaccgtaatttctactaagtgtagatggaaacacaacgctggcctctaatttctactaagtgtagatcgccgacgattaatcaatagtaatttctactaagtgtagatttttttnnnnnnnnnnaagcttggcgtggatccgatatcaactagatcttgagacaaatggcagtattcatccacaattttaaaagaaaaggggggattggggggtacagtgcaggggaaagaatagtagacataatagcaacagacatacaaactaaag

SEQ ID NO: 18139 - DNA, 301 bp, Artificial Sequence
  Nf1.2_NTC.13
  crRNA array
  misc_feature (148)..(157): n is a, c, g, or t
cttggctttatatatcttgtggaaaggacgaaacaccgtaatttctactaagtgtagatggaaacacaacgctggcctctaatttctactaagtgtagatgaccgttgtatcgcgatcaataatttctactaagtgtagatttttttnnnnnnnnnnaagcttggcgtggatccgatatcaactagatcttgagacaaatggcagtattcatccacaattttaaaagaaaaggggggattggggggtacagtgcaggggaaagaatagtagacataatagcaacagacatacaaactaaag

SEQ ID NO: 18140 - DNA, 301 bp, Artificial Sequence
  Nf1.2_NTC.14
  crRNA array
  misc_feature (148)..(157): n is a, c, g, or t
cttggctttatatatcttgtggaaaggacgaaacaccgtaatttctactaagtgtagatggaaacacaacgctggcctctaatttctactaagtgtagatccgttcgtgcgatagtgttttaatttctactaagtgtagatttttttnnnnnnnnnnaagcttggcgtggatccgatatcaactagatcttgagacaaatggcagtattcatccacaattttaaaagaaaaggggggattggggggtacagtgcaggggaaagaatagtagacataatagcaacagacatacaaactaaag

SEQ ID NO: 18141 - DNA, 301 bp, Artificial Sequence
  Nf1.2_NTC.15
  crRNA array
  misc_feature (148)..(157): n is a, c, g, or t
cttggctttatatatcttgtggaaaggacgaaacaccgtaatttctactaagtgtagatggaaacacaacgctggcctctaatttctactaagtgtagatgttgtcgtgccgcgaatttataatttctactaagtgtagatttttttnnnnnnnnnnaagcttggcgtggatccgatatcaactagatcttgagacaaatggcagtattcatccacaattttaaaagaaaaggggggattggggggtacagtgcaggggaaagaatagtagacataatagcaacagacatacaaactaaag

SEQ ID NO: 18142 - DNA, 301 bp, Artificial Sequence
  Nf1.2_NTC.16
  crRNA array
  misc_feature (148)..(157): n is a, c, g, or t
cttggctttatatatcttgtggaaaggacgaaacaccgtaatttctactaagtgtagatggaaacacaacgctggcctctaatttctactaagtgtagatcggtacgttagacgaaaatttaatttctactaagtgtagatttttttnnnnnnnnnnaagcttggcgtggatccgatatcaactagatcttgagacaaatggcagtattcatccacaattttaaaagaaaaggggggattggggggtacagtgcaggggaaagaatagtagacataatagcaacagacatacaaactaaag

SEQ ID NO: 18143 - DNA, 301 bp, Artificial Sequence
  Nf1.2_NTC.17
  crRNA array
  misc_feature (148)..(157): n is a, c, g, or t
cttggctttatatatcttgtggaaaggacgaaacaccgtaatttctactaagtgtagatggaaacacaacgctggcctctaatttctactaagtgtagattatcgaacgctatcgaacgttaatttctactaagtgtagatttttttnnnnnnnnnnaagcttggcgtggatccgatatcaactagatcttgagacaaatggcagtattcatccacaattttaaaagaaaaggggggattggggggtacagtgcaggggaaagaatagtagacataatagcaacagacatacaaactaaag

SEQ ID NO: 18144 - DNA, 301 bp, Artificial Sequence
  Nf1.2_NTC.18
  crRNA array
  misc_feature (148)..(157): n is a, c, g, or t
cttggctttatatatcttgtggaaaggacgaaacaccgtaatttctactaagtgtagatggaaacacaacgctggcctctaatttctactaagtgtagattccggttacgaccggcaaaataatttctactaagtgtagatttttttnnnnnnnnnnaagcttggcgtggatccgatatcaactagatcttgagacaaatggcagtattcatccacaattttaaaagaaaaggggggattggggggtacagtgcaggggaaagaatagtagacataatagcaacagacatacaaactaaag

SEQ ID NO: 18145 - DNA, 301 bp, Artificial Sequence
  Nf1.2_NTC.19
  crRNA array
  misc_feature (148)..(157): n is a, c, g, or t
cttggctttatatatcttgtggaaaggacgaaacaccgtaatttctactaagtgtagatggaaacacaacgctggcctctaatttctactaagtgtagatcgtcgtagaacgatacccgataatttctactaagtgtagatttttttnnnnnnnnnnaagcttggcgtggatccgatatcaactagatcttgagacaaatggcagtattcatccacaattttaaaagaaaaggggggattggggggtacagtgcaggggaaagaatagtagacataatagcaacagacatacaaactaaag

SEQ ID NO: 18146 - DNA, 301 bp, Artificial Sequence
  Nf1.2_NTC.2
  crRNA array
  misc_feature (148)..(157): n is a, c, g, or t
cttggctttatatatcttgtggaaaggacgaaacaccgtaatttctactaagtgtagatggaaacacaacgctggcctctaatttctactaagtgtagatttatgtcgcgccgcgacccgtaatttctactaagtgtagatttttttnnnnnnnnnnaagcttggcgtggatccgatatcaactagatcttgagacaaatggcagtattcatccacaattttaaaagaaaaggggggattggggggtacagtgcaggggaaagaatagtagacataatagcaacagacatacaaactaaag

SEQ ID NO: 18147 - DNA, 301 bp, Artificial Sequence
  Nf1.2_NTC.20
  crRNA array
  misc_feature (148)..(157): n is a, c, g, or t
cttggctttatatatcttgtggaaaggacgaaacaccgtaatttctactaagtgtagatggaaacacaacgctggcctctaatttctactaagtgtagatattccggcgcgaccagaagataatttctactaagtgtagatttttttnnnnnnnnnnaagcttggcgtggatccgatatcaactagatcttgagacaaatggcagtattcatccacaattttaaaagaaaaggggggattggggggtacagtgcaggggaaagaatagtagacataatagcaacagacatacaaactaaag

SEQ ID NO: 18148 - DNA, 301 bp, Artificial Sequence
  Nf1.2_NTC.21
  crRNA array
  misc_feature (148)..(157): n is a, c, g, or t
cttggctttatatatcttgtggaaaggacgaaacaccgtaatttctactaagtgtagatggaaacacaacgctggcctctaatttctactaagtgtagatgtataacttcgcgcggtccgtaatttctactaagtgtagatttttttnnnnnnnnnnaagcttggcgtggatccgatatcaactagatcttgagacaaatggcagtattcatccacaattttaaaagaaaaggggggattggggggtacagtgcaggggaaagaatagtagacataatagcaacagacatacaaactaaag

SEQ ID NO: 18149 - DNA, 301 bp, Artificial Sequence
  Nf1.2_NTC.22
  crRNA array
  misc_feature (148)..(157): n is a, c, g, or t
cttggctttatatatcttgtggaaaggacgaaacaccgtaatttctactaagtgtagatggaaacacaacgctggcctctaatttctactaagtgtagatgcgcgtcaacgtaatgtgcctaatttctactaagtgtagatttttttnnnnnnnnnnaagcttggcgtggatccgatatcaactagatcttgagacaaatggcagtattcatccacaattttaaaagaaaaggggggattggggggtacagtgcaggggaaagaatagtagacataatagcaacagacatacaaactaaag

SEQ ID NO: 18150 - DNA, 301 bp, Artificial Sequence
  Nf1.2_NTC.23
  crRNA array
  misc_feature (148)..(157): n is a, c, g, or t
cttggctttatatatcttgtggaaaggacgaaacaccgtaatttctactaagtgtagatggaaacacaacgctggcctctaatttctactaagtgtagatacgcgctattatcgtaggtgtaatttctactaagtgtagatttttttnnnnnnnnnnaagcttggcgtggatccgatatcaactagatcttgagacaaatggcagtattcatccacaattttaaaagaaaaggggggattggggggtacagtgcaggggaaagaatagtagacataatagcaacagacatacaaactaaag

SEQ ID NO: 18151 - DNA, 301 bp, Artificial Sequence
  Nf1.2_NTC.24
  crRNA array
  misc_feature (148)..(157): n is a, c, g, or t
cttggctttatatatcttgtggaaaggacgaaacaccgtaatttctactaagtgtagatggaaacacaacgctggcctctaatttctactaagtgtagatactatcgacgttcgtcccggtaatttctactaagtgtagatttttttnnnnnnnnnnaagcttggcgtggatccgatatcaactagatcttgagacaaatggcagtattcatccacaattttaaaagaaaaggggggattggggggtacagtgcaggggaaagaatagtagacataatagcaacagacatacaaactaaag

SEQ ID NO: 18152 - DNA, 301 bp, Artificial Sequence
  Nf1.2_NTC.25
  crRNA array
  misc_feature (148)..(157): n is a, c, g, or t
cttggctttatatatcttgtggaaaggacgaaacaccgtaatttctactaagtgtagatggaaacacaacgctggcctctaatttctactaagtgtagattcgcgttatcgtgccgtgcgtaatttctactaagtgtagatttttttnnnnnnnnnnaagcttggcgtggatccgatatcaactagatcttgagacaaatggcagtattcatccacaattttaaaagaaaaggggggattggggggtacagtgcaggggaaagaatagtagacataatagcaacagacatacaaactaaag

SEQ ID NO: 18153 - DNA, 301 bp, Artificial Sequence
  Nf1.2_NTC.26
  crRNA array
  misc_feature (148)..(157): n is a, c, g, or t
cttggctttatatatcttgtggaaaggacgaaacaccgtaatttctactaagtgtagatggaaacacaacgctggcctctaatttctactaagtgtagatcgcgacggcggttttaacactaatttctactaagtgtagatttttttnnnnnnnnnnaagcttggcgtggatccgatatcaactagatcttgagacaaatggcagtattcatccacaattttaaaagaaaaggggggattggggggtacagtgcaggggaaagaatagtagacataatagcaacagacatacaaactaaag

SEQ ID NO: 18154 - DNA, 301 bp, Artificial Sequence
  Nf1.2_NTC.27
  crRNA array
  misc_feature (148)..(157): n is a, c, g, or t
cttggctttatatatcttgtggaaaggacgaaacaccgtaatttctactaagtgtagatggaaacacaacgctggcctctaatttctactaagtgtagatgtcgcgttgcgaccggcgcttaatttctactaagtgtagatttttttnnnnnnnnnnaagcttggcgtggatccgatatcaactagatcttgagacaaatggcagtattcatccacaattttaaaagaaaaggggggattggggggtacagtgcaggggaaagaatagtagacataatagcaacagacatacaaactaaag

SEQ ID NO: 18155 - DNA, 301 bp, Artificial Sequence
  Nf1.2_NTC.28
  crRNA array
  misc_feature (148)..(157): n is a, c, g, or t
cttggctttatatatcttgtggaaaggacgaaacaccgtaatttctactaagtgtagatggaaacacaacgctggcctctaatttctactaagtgtagataccgctaatcggcgtaaacttaatttctactaagtgtagatttttttnnnnnnnnnnaagcttggcgtggatccgatatcaactagatcttgagacaaatggcagtattcatccacaattttaaaagaaaaggggggattggggggtacagtgcaggggaaagaatagtagacataatagcaacagacatacaaactaaag

SEQ ID NO: 18156 - DNA, 301 bp, Artificial Sequence
  Nf1.2_NTC.29
  crRNA array
  misc_feature (148)..(157): n is a, c, g, or t
cttggctttatatatcttgtggaaaggacgaaacaccgtaatttctactaagtgtagatggaaacacaacgctggcctctaatttctactaagtgtagatcgcgatctataccgtctatataatttctactaagtgtagatttttttnnnnnnnnnnaagcttggcgtggatccgatatcaactagatcttgagacaaatggcagtattcatccacaattttaaaagaaaaggggggattggggggtacagtgcaggggaaagaatagtagacataatagcaacagacatacaaactaaag

SEQ ID NO: 18157 - DNA, 301 bp, Artificial Sequence
  Nf1.2_NTC.3
  crRNA array
  misc_feature (148)..(157): n is a, c, g, or t
cttggctttatatatcttgtggaaaggacgaaacaccgtaatttctactaagtgtagatggaaacacaacgctggcctctaatttctactaagtgtagattcgacgcgagacgacgtacataatttctactaagtgtagatttttttnnnnnnnnnnaagcttggcgtggatccgatatcaactagatcttgagacaaatggcagtattcatccacaattttaaaagaaaaggggggattggggggtacagtgcaggggaaagaatagtagacataatagcaacagacatacaaactaaag

SEQ ID NO: 18158 - DNA, 301 bp, Artificial Sequence
  Nf1.2_NTC.30
  crRNA array
  misc_feature (148)..(157): n is a, c, g, or t
cttggctttatatatcttgtggaaaggacgaaacaccgtaatttctactaagtgtagatggaaacacaacgctggcctctaatttctactaagtgtagatcgatcgtacgggtgtcctaataatttctactaagtgtagatttttttnnnnnnnnnnaagcttggcgtggatccgatatcaactagatcttgagacaaatggcagtattcatccacaattttaaaagaaaaggggggattggggggtacagtgcaggggaaagaatagtagacataatagcaacagacatacaaactaaag

SEQ ID NO: 18159 - DNA, 301 bp, Artificial Sequence
  Nf1.2_NTC.31
  crRNA array
  misc_feature (148)..(157): n is a, c, g, or t
cttggctttatatatcttgtggaaaggacgaaacaccgtaatttctactaagtgtagatggaaacacaacgctggcctctaatttctactaagtgtagatgccgaccgcgtgattgtaggtaatttctactaagtgtagatttttttnnnnnnnnnnaagcttggcgtggatccgatatcaactagatcttgagacaaatggcagtattcatccacaattttaaaagaaaaggggggattggggggtacagtgcaggggaaagaatagtagacataatagcaacagacatacaaactaaag

SEQ ID NO: 18160 - DNA, 301 bp, Artificial Sequence
  Nf1.2_NTC.32
  crRNA array
  misc_feature (148)..(157): n is a, c, g, or t
cttggctttatatatcttgtggaaaggacgaaacaccgtaatttctactaagtgtagatggaaacacaacgctggcctctaatttctactaagtgtagatgcacgttacgcccgggtcactaatttctactaagtgtagatttttttnnnnnnnnnnaagcttggcgtggatccgatatcaactagatcttgagacaaatggcagtattcatccacaattttaaaagaaaaggggggattggggggtacagtgcaggggaaagaatagtagacataatagcaacagacatacaaactaaag

SEQ ID NO: 18161 - DNA, 301 bp, Artificial Sequence
  Nf1.2_NTC.33
  crRNA array
  misc_feature (148)..(157): n is a, c, g, or t
cttggctttatatatcttgtggaaaggacgaaacaccgtaatttctactaagtgtagatggaaacacaacgctggcctctaatttctactaagtgtagattaagcgaccgacgcattcgctaatttctactaagtgtagatttttttnnnnnnnnnnaagcttggcgtggatccgatatcaactagatcttgagacaaatggcagtattcatccacaattttaaaagaaaaggggggattggggggtacagtgcaggggaaagaatagtagacataatagcaacagacatacaaactaaag

SEQ ID NO: 18162 - DNA, 301 bp, Artificial Sequence
  Nf1.2_NTC.34
  crRNA array
  misc_feature (148)..(157): n is a, c, g, or t
cttggctttatatatcttgtggaaaggacgaaacaccgtaatttctactaagtgtagatggaaacacaacgctggcctctaatttctactaagtgtagattagcgttcgacacgtgaaactaatttctactaagtgtagatttttttnnnnnnnnnnaagcttggcgtggatccgatatcaactagatcttgagacaaatggcagtattcatccacaattttaaaagaaaaggggggattggggggtacagtgcaggggaaagaatagtagacataatagcaacagacatacaaactaaag

SEQ ID NO: 18163 - DNA, 301 bp, Artificial Sequence
  Nf1.2_NTC.35
  crRNA array
  misc_feature (148)..(157): n is a, c, g, or t
cttggctttatatatcttgtggaaaggacgaaacaccgtaatttctactaagtgtagatggaaacacaacgctggcctctaatttctactaagtgtagattggcgcgtaatcgctattcgtaatttctactaagtgtagatttttttnnnnnnnnnnaagcttggcgtggatccgatatcaactagatcttgagacaaatggcagtattcatccacaattttaaaagaaaaggggggattggggggtacagtgcaggggaaagaatagtagacataatagcaacagacatacaaactaaag

SEQ ID NO: 18164 - DNA, 301 bp, Artificial Sequence
  Nf1.2_NTC.36
  crRNA array
  misc_feature (148)..(157): n is a, c, g, or t
cttggctttatatatcttgtggaaaggacgaaacaccgtaatttctactaagtgtagatggaaacacaacgctggcctctaatttctactaagtgtagatcaacccgccgtagcgggccttaatttctactaagtgtagatttttttnnnnnnnnnnaagcttggcgtggatccgatatcaactagatcttgagacaaatggcagtattcatccacaattttaaaagaaaaggggggattggggggtacagtgcaggggaaagaatagtagacataatagcaacagacatacaaactaaag

SEQ ID NO: 18165 - DNA, 301 bp, Artificial Sequence
  Nf1.2_NTC.37
  crRNA array
  misc_feature (148)..(157): n is a, c, g, or t
cttggctttatatatcttgtggaaaggacgaaacaccgtaatttctactaagtgtagatggaaacacaacgctggcctctaatttctactaagtgtagattttgcgttgacgcgattacttaatttctactaagtgtagatttttttnnnnnnnnnnaagcttggcgtggatccgatatcaactagatcttgagacaaatggcagtattcatccacaattttaaaagaaaaggggggattggggggtacagtgcaggggaaagaatagtagacataatagcaacagacatacaaactaaag

SEQ ID NO: 18166 - DNA, 301 bp, Artificial Sequence
  Nf1.2_NTC.38
  crRNA array
  misc_feature (148)..(157): n is a, c, g, or t
cttggctttatatatcttgtggaaaggacgaaacaccgtaatttctactaagtgtagatggaaacacaacgctggcctctaatttctactaagtgtagataacggagcgcgatactaccataatttctactaagtgtagatttttttnnnnnnnnnnaagcttggcgtggatccgatatcaactagatcttgagacaaatggcagtattcatccacaattttaaaagaaaaggggggattggggggtacagtgcaggggaaagaatagtagacataatagcaacagacatacaaactaaag

SEQ ID NO: 18167 - DNA, 301 bp, Artificial Sequence
  Nf1.2_NTC.39
  crRNA array
  misc_feature (148)..(157): n is a, c, g, or t
cttggctttatatatcttgtggaaaggacgaaacaccgtaatttctactaagtgtagatggaaacacaacgctggcctctaatttctactaagtgtagatccggacgttataacgtttcttaatttctactaagtgtagatttttttnnnnnnnnnnaagcttggcgtggatccgatatcaactagatcttgagacaaatggcagtattcatccacaattttaaaagaaaaggggggattggggggtacagtgcaggggaaagaatagtagacataatagcaacagacatacaaactaaag

SEQ ID NO: 18168 - DNA, 301 bp, Artificial Sequence
  Nf1.2_NTC.4
  crRNA array
  misc_feature (148)..(157): n is a, c, g, or t
cttggctttatatatcttgtggaaaggacgaaacaccgtaatttctactaagtgtagatggaaacacaacgctggcctctaatttctactaagtgtagatatacccgtcgcgaacgtgagtaatttctactaagtgtagatttttttnnnnnnnnnnaagcttggcgtggatccgatatcaactagatcttgagacaaatggcagtattcatccacaattttaaaagaaaaggggggattggggggtacagtgcaggggaaagaatagtagacataatagcaacagacatacaaactaaag

SEQ ID NO: 18169 - DNA, 301 bp, Artificial Sequence
  Nf1.2_NTC.40
  crRNA array
  misc_feature (148)..(157): n is a, c, g, or t
cttggctttatatatcttgtggaaaggacgaaacaccgtaatttctactaagtgtagatggaaacacaacgctggcctctaatttctactaagtgtagatattcgcgaacccggccggaataatttctactaagtgtagatttttttnnnnnnnnnnaagcttggcgtggatccgatatcaactagatcttgagacaaatggcagtattcatccacaattttaaaagaaaaggggggattggggggtacagtgcaggggaaagaatagtagacataatagcaacagacatacaaactaaag

SEQ ID NO: 18170 - DNA, 301 bp, Artificial Sequence
  Nf1.2_NTC.41
  crRNA array
  misc_feature (148)..(157): n is a, c, g, or t
cttggctttatatatcttgtggaaaggacgaaacaccgtaatttctactaagtgtagatggaaacacaacgctggcctctaatttctactaagtgtagatttgatggcgcgacgcgttattaatttctactaagtgtagatttttttnnnnnnnnnnaagcttggcgtggatccgatatcaactagatcttgagacaaatggcagtattcatccacaattttaaaagaaaaggggggattggggggtacagtgcaggggaaagaatagtagacataatagcaacagacatacaaactaaag

SEQ ID NO: 18171 - DNA, 301 bp, Artificial Sequence
  Nf1.2_NTC.42
  crRNA array
  misc_feature (148)..(157): n is a, c, g, or t
cttggctttatatatcttgtggaaaggacgaaacaccgtaatttctactaagtgtagatggaaacacaacgctggcctctaatttctactaagtgtagatggtcaaatcgcggcgataactaatttctactaagtgtagatttttttnnnnnnnnnnaagcttggcgtggatccgatatcaactagatcttgagacaaatggcagtattcatccacaattttaaaagaaaaggggggattggggggtacagtgcaggggaaagaatagtagacataatagcaacagacatacaaactaaag

SEQ ID NO: 18172 - DNA, 301 bp, Artificial Sequence
  Nf1.2_NTC.43
  crRNA array
  misc_feature (148)..(157): n is a, c, g, or t
cttggctttatatatcttgtggaaaggacgaaacaccgtaatttctactaagtgtagatggaaacacaacgctggcctctaatttctactaagtgtagatcgactcgcgcattgaactggtaatttctactaagtgtagatttttttnnnnnnnnnnaagcttggcgtggatccgatatcaactagatcttgagacaaatggcagtattcatccacaattttaaaagaaaaggggggattggggggtacagtgcaggggaaagaatagtagacataatagcaacagacatacaaactaaag

SEQ ID NO: 18173 - DNA, 301 bp, Artificial Sequence
  Nf1.2_NTC.44
  crRNA array
  misc_feature (148)..(157): n is a, c, g, or t
cttggctttatatatcttgtggaaaggacgaaacaccgtaatttctactaagtgtagatggaaacacaacgctggcctctaatttctactaagtgtagatagcgtcgtacgatttatcgttaatttctactaagtgtagatttttttnnnnnnnnnnaagcttggcgtggatccgatatcaactagatcttgagacaaatggcagtattcatccacaattttaaaagaaaaggggggattggggggtacagtgcaggggaaagaatagtagacataatagcaacagacatacaaactaaag

SEQ ID NO: 18174 - DNA, 301 bp, Artificial Sequence
  Nf1.2_NTC.45
  crRNA array
  misc_feature (148)..(157): n is a, c, g, or t
cttggctttatatatcttgtggaaaggacgaaacaccgtaatttctactaagtgtagatggaaacacaacgctggcctctaatttctactaagtgtagatcggaacgcgtgatactagggtaatttctactaagtgtagatttttttnnnnnnnnnnaagcttggcgtggatccgatatcaactagatcttgagacaaatggcagtattcatccacaattttaaaagaaaaggggggattggggggtacagtgcaggggaaagaatagtagacataatagcaacagacatacaaactaaag

SEQ ID NO: 18175 - DNA, 301 bp, Artificial Sequence
  Nf1.2_NTC.46
  crRNA array
  misc_feature (148)..(157): n is a, c, g, or t
cttggctttatatatcttgtggaaaggacgaaacaccgtaatttctactaagtgtagatggaaacacaacgctggcctctaatttctactaagtgtagatagcgggtcgtagacgcgcggtaatttctactaagtgtagatttttttnnnnnnnnnnaagcttggcgtggatccgatatcaactagatcttgagacaaatggcagtattcatccacaattttaaaagaaaaggggggattggggggtacagtgcaggggaaagaatagtagacataatagcaacagacatacaaactaaag

SEQ ID NO: 18176 - DNA, 301 bp, Artificial Sequence
  Nf1.2_NTC.47
  crRNA array
  misc_feature (148)..(157): n is a, c, g, or t
cttggctttatatatcttgtggaaaggacgaaacaccgtaatttctactaagtgtagatggaaacacaacgctggcctctaatttctactaagtgtagattctcgtatcgcgattgttaataatttctactaagtgtagatttttttnnnnnnnnnnaagcttggcgtggatccgatatcaactagatcttgagacaaatggcagtattcatccacaattttaaaagaaaaggggggattggggggtacagtgcaggggaaagaatagtagacataatagcaacagacatacaaactaaag

SEQ ID NO: 18177 - DNA, 301 bp, Artificial Sequence
  Nf1.2_NTC.48
  crRNA array
  misc_feature (148)..(157): n is a, c, g, or t
cttggctttatatatcttgtggaaaggacgaaacaccgtaatttctactaagtgtagatggaaacacaacgctggcctctaatttctactaagtgtagatcggtcgactacggctgttagtaatttctactaagtgtagatttttttnnnnnnnnnnaagcttggcgtggatccgatatcaactagatcttgagacaaatggcagtattcatccacaattttaaaagaaaaggggggattggggggtacagtgcaggggaaagaatagtagacataatagcaacagacatacaaactaaag

SEQ ID NO: 18178 - DNA, 301 bp, Artificial Sequence
  Nf1.2_NTC.49
  crRNA array
  misc_feature (148)..(157): n is a, c, g, or t
cttggctttatatatcttgtggaaaggacgaaacaccgtaatttctactaagtgtagatggaaacacaacgctggcctctaatttctactaagtgtagattcggggcgcgtcaactgaattaatttctactaagtgtagatttttttnnnnnnnnnnaagcttggcgtggatccgatatcaactagatcttgagacaaatggcagtattcatccacaattttaaaagaaaaggggggattggggggtacagtgcaggggaaagaatagtagacataatagcaacagacatacaaactaaag

SEQ ID NO: 18179 - DNA, 301 bp, Artificial Sequence
  Nf1.2_NTC.5
  crRNA array
  misc_feature (148)..(157): n is a, c, g, or t
cttggctttatatatcttgtggaaaggacgaaacaccgtaatttctactaagtgtagatggaaacacaacgctggcctctaatttctactaagtgtagatgcttacgcgtcgcgaatgtataatttctactaagtgtagatttttttnnnnnnnnnnaagcttggcgtggatccgatatcaactagatcttgagacaaatggcagtattcatccacaattttaaaagaaaaggggggattggggggtacagtgcaggggaaagaatagtagacataatagcaacagacatacaaactaaag

SEQ ID NO: 18180 - DNA, 301 bp, Artificial Sequence
  Nf1.2_NTC.50
  crRNA array
  misc_feature (148)..(157): n is a, c, g, or t
cttggctttatatatcttgtggaaaggacgaaacaccgtaatttctactaagtgtagatggaaacacaacgctggcctctaatttctactaagtgtagatattgccgctcgcgcaaaatctaatttctactaagtgtagatttttttnnnnnnnnnnaagcttggcgtggatccgatatcaactagatcttgagacaaatggcagtattcatccacaattttaaaagaaaaggggggattggggggtacagtgcaggggaaagaatagtagacataatagcaacagacatacaaactaaag

SEQ ID NO: 18181 - DNA, 301 bp, Artificial Sequence
  Nf1.2_NTC.51
  crRNA array
  misc_feature (148)..(157): n is a, c, g, or t
cttggctttatatatcttgtggaaaggacgaaacaccgtaatttctactaagtgtagatggaaacacaacgctggcctctaatttctactaagtgtagattaacgcgcaacacgccaatgtaatttctactaagtgtagatttttttnnnnnnnnnnaagcttggcgtggatccgatatcaactagatcttgagacaaatggcagtattcatccacaattttaaaagaaaaggggggattggggggtacagtgcaggggaaagaatagtagacataatagcaacagacatacaaactaaag

SEQ ID NO: 18182 - DNA, 301 bp, Artificial Sequence
  Nf1.2_NTC.6
  crRNA array
  misc_feature (148)..(157): n is a, c, g, or t
cttggctttatatatcttgtggaaaggacgaaacaccgtaatttctactaagtgtagatggaaacacaacgctggcctctaatttctactaagtgtagatcgaatcgcgcctacgggaattaatttctactaagtgtagatttttttnnnnnnnnnnaagcttggcgtggatccgatatcaactagatcttgagacaaatggcagtattcatccacaattttaaaagaaaaggggggattggggggtacagtgcaggggaaagaatagtagacataatagcaacagacatacaaactaaag

SEQ ID NO: 18183 - DNA, 301 bp, Artificial Sequence
  Nf1.2_NTC.7
  crRNA array
  misc_feature (148)..(157): n is a, c, g, or t
cttggctttatatatcttgtggaaaggacgaaacaccgtaatttctactaagtgtagatggaaacacaacgctggcctctaatttctactaagtgtagatcgccgaacggataagactattaatttctactaagtgtagatttttttnnnnnnnnnnaagcttggcgtggatccgatatcaactagatcttgagacaaatggcagtattcatccacaattttaaaagaaaaggggggattggggggtacagtgcaggggaaagaatagtagacataatagcaacagacatacaaactaaag

SEQ ID NO: 18184 - DNA, 301 bp, Artificial Sequence
  Nf1.2_NTC.8
  crRNA array
  misc_feature (148)..(157): n is a, c, g, or t
cttggctttatatatcttgtggaaaggacgaaacaccgtaatttctactaagtgtagatggaaacacaacgctggcctctaatttctactaagtgtagatcgaccgaggttacgctgggataatttctactaagtgtagatttttttnnnnnnnnnnaagcttggcgtggatccgatatcaactagatcttgagacaaatggcagtattcatccacaattttaaaagaaaaggggggattggggggtacagtgcaggggaaagaatagtagacataatagcaacagacatacaaactaaag

SEQ ID NO: 18185 - DNA, 301 bp, Artificial Sequence
  Nf1.2_NTC.9
  crRNA array
  misc_feature (148)..(157): n is a, c, g, or t
cttggctttatatatcttgtggaaaggacgaaacaccgtaatttctactaagtgtagatggaaacacaacgctggcctctaatttctactaagtgtagatatcgccgtacggctatggcataatttctactaagtgtagatttttttnnnnnnnnnnaagcttggcgtggatccgatatcaactagatcttgagacaaatggcagtattcatccacaattttaaaagaaaaggggggattggggggtacagtgcaggggaaagaatagtagacataatagcaacagacatacaaactaaag

SEQ ID NO: 18186 - DNA, 301 bp, Artificial Sequence
  Nf1.3_NTC.0
  crRNA array
  misc_feature (148)..(157): n is a, c, g, or t
cttggctttatatatcttgtggaaaggacgaaacaccgtaatttctactaagtgtagataatgatggaacgcagtcgcataatttctactaagtgtagattatagcgtcgcgcgctaatttaatttctactaagtgtagatttttttnnnnnnnnnnaagcttggcgtggatccgatatcaactagatcttgagacaaatggcagtattcatccacaattttaaaagaaaaggggggattggggggtacagtgcaggggaaagaatagtagacataatagcaacagacatacaaactaaag

SEQ ID NO: 18187 - DNA, 301 bp, Artificial Sequence
  Nf1.3_NTC.1
  crRNA array
  misc_feature (148)..(157): n is a, c, g, or t
cttggctttatatatcttgtggaaaggacgaaacaccgtaatttctactaagtgtagataatgatggaacgcagtcgcataatttctactaagtgtagatcgcgtaaccgttccggctcctaatttctactaagtgtagatttttttnnnnnnnnnnaagcttggcgtggatccgatatcaactagatcttgagacaaatggcagtattcatccacaattttaaaagaaaaggggggattggggggtacagtgcaggggaaagaatagtagacataatagcaacagacatacaaactaaag

SEQ ID NO: 18188 - DNA, 301 bp, Artificial Sequence
  Nf1.3_NTC.10
  crRNA array
  misc_feature (148)..(157): n is a, c, g, or t
cttggctttatatatcttgtggaaaggacgaaacaccgtaatttctactaagtgtagataatgatggaacgcagtcgcataatttctactaagtgtagatcgctaagttcgcgcgggccgtaatttctactaagtgtagatttttttnnnnnnnnnnaagcttggcgtggatccgatatcaactagatcttgagacaaatggcagtattcatccacaattttaaaagaaaaggggggattggggggtacagtgcaggggaaagaatagtagacataatagcaacagacatacaaactaaag

SEQ ID NO: 18189 - DNA, 301 bp, Artificial Sequence
  Nf1.3_NTC.11
  crRNA array
  misc_feature (148)..(157): n is a, c, g, or t
cttggctttatatatcttgtggaaaggacgaaacaccgtaatttctactaagtgtagataatgatggaacgcagtcgcataatttctactaagtgtagatcgttcgtcgacgaagcaatctaatttctactaagtgtagatttttttnnnnnnnnnnaagcttggcgtggatccgatatcaactagatcttgagacaaatggcagtattcatccacaattttaaaagaaaaggggggattggggggtacagtgcaggggaaagaatagtagacataatagcaacagacatacaaactaaag

SEQ ID NO: 18190 - DNA, 301 bp, Artificial Sequence
  Nf1.3_NTC.12
  crRNA array
  misc_feature (148)..(157): n is a, c, g, or t
cttggctttatatatcttgtggaaaggacgaaacaccgtaatttctactaagtgtagataatgatggaacgcagtcgcataatttctactaagtgtagatcgccgacgattaatcaatagtaatttctactaagtgtagatttttttnnnnnnnnnnaagcttggcgtggatccgatatcaactagatcttgagacaaatggcagtattcatccacaattttaaaagaaaaggggggattggggggtacagtgcaggggaaagaatagtagacataatagcaacagacatacaaactaaag

SEQ ID NO: 18191 - DNA, 301 bp, Artificial Sequence
  Nf1.3_NTC.13
  crRNA array
  misc_feature (148)..(157): n is a, c, g, or t
cttggctttatatatcttgtggaaaggacgaaacaccgtaatttctactaagtgtagataatgatggaacgcagtcgcataatttctactaagtgtagatgaccgttgtatcgcgatcaataatttctactaagtgtagatttttttnnnnnnnnnnaagcttggcgtggatccgatatcaactagatcttgagacaaatggcagtattcatccacaattttaaaagaaaaggggggattggggggtacagtgcaggggaaagaatagtagacataatagcaacagacatacaaactaaag

SEQ ID NO: 18192 - DNA, 301 bp, Artificial Sequence
  Nf1.3_NTC.14
  crRNA array
  misc_feature (148)..(157): n is a, c, g, or t
cttggctttatatatcttgtggaaaggacgaaacaccgtaatttctactaagtgtagataatgatggaacgcagtcgcataatttctactaagtgtagatccgttcgtgcgatagtgttttaatttctactaagtgtagatttttttnnnnnnnnnnaagcttggcgtggatccgatatcaactagatcttgagacaaatggcagtattcatccacaattttaaaagaaaaggggggattggggggtacagtgcaggggaaagaatagtagacataatagcaacagacatacaaactaaag

SEQ ID NO: 18193 - DNA, 301 bp, Artificial Sequence
  Nf1.3_NTC.15
  crRNA array
  misc_feature (148)..(157): n is a, c, g, or t
cttggctttatatatcttgtggaaaggacgaaacaccgtaatttctactaagtgtagataatgatggaacgcagtcgcataatttctactaagtgtagatgttgtcgtgccgcgaatttataatttctactaagtgtagatttttttnnnnnnnnnnaagcttggcgtggatccgatatcaactagatcttgagacaaatggcagtattcatccacaattttaaaagaaaaggggggattggggggtacagtgcaggggaaagaatagtagacataatagcaacagacatacaaactaaag

SEQ ID NO: 18194 - DNA, 301 bp, Artificial Sequence
  Nf1.3_NTC.16
  crRNA array
  misc_feature (148)..(157): n is a, c, g, or t
cttggctttatatatcttgtggaaaggacgaaacaccgtaatttctactaagtgtagataatgatggaacgcagtcgcataatttctactaagtgtagatcggtacgttagacgaaaatttaatttctactaagtgtagatttttttnnnnnnnnnnaagcttggcgtggatccgatatcaactagatcttgagacaaatggcagtattcatccacaattttaaaagaaaaggggggattggggggtacagtgcaggggaaagaatagtagacataatagcaacagacatacaaactaaag

SEQ ID NO: 18195 - DNA, 301 bp, Artificial Sequence
  Nf1.3_NTC.17
  crRNA array
  misc_feature (148)..(157): n is a, c, g, or t
cttggctttatatatcttgtggaaaggacgaaacaccgtaatttctactaagtgtagataatgatggaacgcagtcgcataatttctactaagtgtagattatcgaacgctatcgaacgttaatttctactaagtgtagatttttttnnnnnnnnnnaagcttggcgtggatccgatatcaactagatcttgagacaaatggcagtattcatccacaattttaaaagaaaaggggggattggggggtacagtgcaggggaaagaatagtagacataatagcaacagacatacaaactaaag

SEQ ID NO: 18196 - DNA, 301 bp, Artificial Sequence
  Nf1.3_NTC.18
  crRNA array
  misc_feature (148)..(157): n is a, c, g, or t
cttggctttatatatcttgtggaaaggacgaaacaccgtaatttctactaagtgtagataatgatggaacgcagtcgcataatttctactaagtgtagattccggttacgaccggcaaaataatttctactaagtgtagatttttttnnnnnnnnnnaagcttggcgtggatccgatatcaactagatcttgagacaaatggcagtattcatccacaattttaaaagaaaaggggggattggggggtacagtgcaggggaaagaatagtagacataatagcaacagacatacaaactaaag

SEQ ID NO: 18197 - DNA, 301 bp, Artificial Sequence
  Nf1.3_NTC.19
  crRNA array
  misc_feature (148)..(157): n is a, c, g, or t
cttggctttatatatcttgtggaaaggacgaaacaccgtaatttctactaagtgtagataatgatggaacgcagtcgcataatttctactaagtgtagatcgtcgtagaacgatacccgataatttctactaagtgtagatttttttnnnnnnnnnnaagcttggcgtggatccgatatcaactagatcttgagacaaatggcagtattcatccacaattttaaaagaaaaggggggattggggggtacagtgcaggggaaagaatagtagacataatagcaacagacatacaaactaaag

SEQ ID NO: 18198 - DNA, 301 bp, Artificial Sequence
  Nf1.3_NTC.2
  crRNA array
  misc_feature (148)..(157): n is a, c, g, or t
cttggctttatatatcttgtggaaaggacgaaacaccgtaatttctactaagtgtagataatgatggaacgcagtcgcataatttctactaagtgtagatttatgtcgcgccgcgacccgtaatttctactaagtgtagatttttttnnnnnnnnnnaagcttggcgtggatccgatatcaactagatcttgagacaaatggcagtattcatccacaattttaaaagaaaaggggggattggggggtacagtgcaggggaaagaatagtagacataatagcaacagacatacaaactaaag

SEQ ID NO: 18199 - DNA, 301 bp, Artificial Sequence
  Nf1.3_NTC.20
  crRNA array
  misc_feature (148)..(157): n is a, c, g, or t
cttggctttatatatcttgtggaaaggacgaaacaccgtaatttctactaagtgtagataatgatggaacgcagtcgcataatttctactaagtgtagatattccggcgcgaccagaagataatttctactaagtgtagatttttttnnnnnnnnnnaagcttggcgtggatccgatatcaactagatcttgagacaaatggcagtattcatccacaattttaaaagaaaaggggggattggggggtacagtgcaggggaaagaatagtagacataatagcaacagacatacaaactaaag

SEQ ID NO: 18200 - DNA, 301 bp, Artificial Sequence
  Nf1.3_NTC.21
  crRNA array
  misc_feature (148)..(157): n is a, c, g, or t
cttggctttatatatcttgtggaaaggacgaaacaccgtaatttctactaagtgtagataatgatggaacgcagtcgcataatttctactaagtgtagatgtataacttcgcgcggtccgtaatttctactaagtgtagatttttttnnnnnnnnnnaagcttggcgtggatccgatatcaactagatcttgagacaaatggcagtattcatccacaattttaaaagaaaaggggggattggggggtacagtgcaggggaaagaatagtagacataatagcaacagacatacaaactaaag

SEQ ID NO: 18201 - DNA, 301 bp, Artificial Sequence
  Nf1.3_NTC.22
  crRNA array
  misc_feature (148)..(157): n is a, c, g, or t
cttggctttatatatcttgtggaaaggacgaaacaccgtaatttctactaagtgtagataatgatggaacgcagtcgcataatttctactaagtgtagatgcgcgtcaacgtaatgtgcctaatttctactaagtgtagatttttttnnnnnnnnnnaagcttggcgtggatccgatatcaactagatcttgagacaaatggcagtattcatccacaattttaaaagaaaaggggggattggggggtacagtgcaggggaaagaatagtagacataatagcaacagacatacaaactaaag

SEQ ID NO: 18202 - DNA, 301 bp, Artificial Sequence
  Nf1.3_NTC.23
  crRNA array
  misc_feature (148)..(157): n is a, c, g, or t
cttggctttatatatcttgtggaaaggacgaaacaccgtaatttctactaagtgtagataatgatggaacgcagtcgcataatttctactaagtgtagatacgcgctattatcgtaggtgtaatttctactaagtgtagatttttttnnnnnnnnnnaagcttggcgtggatccgatatcaactagatcttgagacaaatggcagtattcatccacaattttaaaagaaaaggggggattggggggtacagtgcaggggaaagaatagtagacataatagcaacagacatacaaactaaag

SEQ ID NO: 18203 - DNA, 301 bp, Artificial Sequence
  Nf1.3_NTC.24
  crRNA array
  misc_feature (148)..(157): n is a, c, g, or t
cttggctttatatatcttgtggaaaggacgaaacaccgtaatttctactaagtgtagataatgatggaacgcagtcgcataatttctactaagtgtagatactatcgacgttcgtcccggtaatttctactaagtgtagatttttttnnnnnnnnnnaagcttggcgtggatccgatatcaactagatcttgagacaaatggcagtattcatccacaattttaaaagaaaaggggggattggggggtacagtgcaggggaaagaatagtagacataatagcaacagacatacaaactaaag

SEQ ID NO: 18204 - DNA, 301 bp, Artificial Sequence
  Nf1.3_NTC.25
  crRNA array
  misc_feature (148)..(157): n is a, c, g, or t
cttggctttatatatcttgtggaaaggacgaaacaccgtaatttctactaagtgtagataatgatggaacgcagtcgcataatttctactaagtgtagattcgcgttatcgtgccgtgcgtaatttctactaagtgtagatttttttnnnnnnnnnnaagcttggcgtggatccgatatcaactagatcttgagacaaatggcagtattcatccacaattttaaaagaaaaggggggattggggggtacagtgcaggggaaagaatagtagacataatagcaacagacatacaaactaaag

SEQ ID NO: 18205 - DNA, 301 bp, Artificial Sequence
  Nf1.3_NTC.26
  crRNA array
  misc_feature (148)..(157): n is a, c, g, or t
cttggctttatatatcttgtggaaaggacgaaacaccgtaatttctactaagtgtagataatgatggaacgcagtcgcataatttctactaagtgtagatcgcgacggcggttttaacactaatttctactaagtgtagatttttttnnnnnnnnnnaagcttggcgtggatccgatatcaactagatcttgagacaaatggcagtattcatccacaattttaaaagaaaaggggggattggggggtacagtgcaggggaaagaatagtagacataatagcaacagacatacaaactaaag

SEQ ID NO: 18206 - DNA, 301 bp, Artificial Sequence
  Nf1.3_NTC.27
  crRNA array
  misc_feature (148)..(157): n is a, c, g, or t
cttggctttatatatcttgtggaaaggacgaaacaccgtaatttctactaagtgtagataatgatggaacgcagtcgcataatttctactaagtgtagatgtcgcgttgcgaccggcgcttaatttctactaagtgtagatttttttnnnnnnnnnnaagcttggcgtggatccgatatcaactagatcttgagacaaatggcagtattcatccacaattttaaaagaaaaggggggattggggggtacagtgcaggggaaagaatagtagacataatagcaacagacatacaaactaaag

SEQ ID NO: 18207 - DNA, 301 bp, Artificial Sequence
  Nf1.3_NTC.28
  crRNA array
  misc_feature (148)..(157): n is a, c, g, or t
cttggctttatatatcttgtggaaaggacgaaacaccgtaatttctactaagtgtagataatgatggaacgcagtcgcataatttctactaagtgtagataccgctaatcggcgtaaacttaatttctactaagtgtagatttttttnnnnnnnnnnaagcttggcgtggatccgatatcaactagatcttgagacaaatggcagtattcatccacaattttaaaagaaaaggggggattggggggtacagtgcaggggaaagaatagtagacataatagcaacagacatacaaactaaag

SEQ ID NO: 18208 - DNA, 301 bp, Artificial Sequence
  Nf1.3_NTC.29
  crRNA array
  misc_feature (148)..(157): n is a, c, g, or t
cttggctttatatatcttgtggaaaggacgaaacaccgtaatttctactaagtgtagataatgatggaacgcagtcgcataatttctactaagtgtagatcgcgatctataccgtctatataatttctactaagtgtagatttttttnnnnnnnnnnaagcttggcgtggatccgatatcaactagatcttgagacaaatggcagtattcatccacaattttaaaagaaaaggggggattggggggtacagtgcaggggaaagaatagtagacataatagcaacagacatacaaactaaag

SEQ ID NO: 18209 - DNA, 301 bp, Artificial Sequence
  Nf1.3_NTC.3
  crRNA array
  misc_feature (148)..(157): n is a, c, g, or t
cttggctttatatatcttgtggaaaggacgaaacaccgtaatttctactaagtgtagataatgatggaacgcagtcgcataatttctactaagtgtagattcgacgcgagacgacgtacataatttctactaagtgtagatttttttnnnnnnnnnnaagcttggcgtggatccgatatcaactagatcttgagacaaatggcagtattcatccacaattttaaaagaaaaggggggattggggggtacagtgcaggggaaagaatagtagacataatagcaacagacatacaaactaaag

SEQ ID NO: 18210 - DNA, 301 bp, Artificial Sequence
  Nf1.3_NTC.30
  crRNA array
  misc_feature (148)..(157): n is a, c, g, or t
cttggctttatatatcttgtggaaaggacgaaacaccgtaatttctactaagtgtagataatgatggaacgcagtcgcataatttctactaagtgtagatcgatcgtacgggtgtcctaataatttctactaagtgtagatttttttnnnnnnnnnnaagcttggcgtggatccgatatcaactagatcttgagacaaatggcagtattcatccacaattttaaaagaaaaggggggattggggggtacagtgcaggggaaagaatagtagacataatagcaacagacatacaaactaaag

SEQ ID NO: 18211 - DNA, 301 bp, Artificial Sequence
  Nf1.3_NTC.31
  crRNA array
  misc_feature (148)..(157): n is a, c, g, or t
cttggctttatatatcttgtggaaaggacgaaacaccgtaatttctactaagtgtagataatgatggaacgcagtcgcataatttctactaagtgtagatgccgaccgcgtgattgtaggtaatttctactaagtgtagatttttttnnnnnnnnnnaagcttggcgtggatccgatatcaactagatcttgagacaaatggcagtattcatccacaattttaaaagaaaaggggggattggggggtacagtgcaggggaaagaatagtagacataatagcaacagacatacaaactaaag

SEQ ID NO: 18212 - DNA, 301 bp, Artificial Sequence
  Nf1.3_NTC.32
  crRNA array
  misc_feature (148)..(157): n is a, c, g, or t
cttggctttatatatcttgtggaaaggacgaaacaccgtaatttctactaagtgtagataatgatggaacgcagtcgcataatttctactaagtgtagatgcacgttacgcccgggtcactaatttctactaagtgtagatttttttnnnnnnnnnnaagcttggcgtggatccgatatcaactagatcttgagacaaatggcagtattcatccacaattttaaaagaaaaggggggattggggggtacagtgcaggggaaagaatagtagacataatagcaacagacatacaaactaaag

SEQ ID NO: 18213 - DNA, 301 bp, Artificial Sequence
  Nf1.3_NTC.33
  crRNA array
  misc_feature (148)..(157): n is a, c, g, or t
cttggctttatatatcttgtggaaaggacgaaacaccgtaatttctactaagtgtagataatgatggaacgcagtcgcataatttctactaagtgtagattaagcgaccgacgcattcgctaatttctactaagtgtagatttttttnnnnnnnnnnaagcttggcgtggatccgatatcaactagatcttgagacaaatggcagtattcatccacaattttaaaagaaaaggggggattggggggtacagtgcaggggaaagaatagtagacataatagcaacagacatacaaactaaag

SEQ ID NO: 18214 - DNA, 301 bp, Artificial Sequence
  Nf1.3_NTC.34
  crRNA array
  misc_feature (148)..(157): n is a, c, g, or t
cttggctttatatatcttgtggaaaggacgaaacaccgtaatttctactaagtgtagataatgatggaacgcagtcgcataatttctactaagtgtagattagcgttcgacacgtgaaactaatttctactaagtgtagatttttttnnnnnnnnnnaagcttggcgtggatccgatatcaactagatcttgagacaaatggcagtattcatccacaattttaaaagaaaaggggggattggggggtacagtgcaggggaaagaatagtagacataatagcaacagacatacaaactaaag

SEQ ID NO: 18215 - DNA, 301 bp, Artificial Sequence
  Nf1.3_NTC.35
  crRNA array
  misc_feature (148)..(157): n is a, c, g, or t
cttggctttatatatcttgtggaaaggacgaaacaccgtaatttctactaagtgtagataatgatggaacgcagtcgcataatttctactaagtgtagattggcgcgtaatcgctattcgtaatttctactaagtgtagatttttttnnnnnnnnnnaagcttggcgtggatccgatatcaactagatcttgagacaaatggcagtattcatccacaattttaaaagaaaaggggggattggggggtacagtgcaggggaaagaatagtagacataatagcaacagacatacaaactaaag

SEQ ID NO: 18216 - DNA, 301 bp, Artificial Sequence
  Nf1.3_NTC.36
  crRNA array
  misc_feature (148)..(157): n is a, c, g, or t
cttggctttatatatcttgtggaaaggacgaaacaccgtaatttctactaagtgtagataatgatggaacgcagtcgcataatttctactaagtgtagatcaacccgccgtagcgggccttaatttctactaagtgtagatttttttnnnnnnnnnnaagcttggcgtggatccgatatcaactagatcttgagacaaatggcagtattcatccacaattttaaaagaaaaggggggattggggggtacagtgcaggggaaagaatagtagacataatagcaacagacatacaaactaaag

SEQ ID NO: 18217 - DNA, 301 bp, Artificial Sequence
  Nf1.3_NTC.37
  crRNA array
  misc_feature (148)..(157): n is a, c, g, or t
cttggctttatatatcttgtggaaaggacgaaacaccgtaatttctactaagtgtagataatgatggaacgcagtcgcataatttctactaagtgtagattttgcgttgacgcgattacttaatttctactaagtgtagatttttttnnnnnnnnnnaagcttggcgtggatccgatatcaactagatcttgagacaaatggcagtattcatccacaattttaaaagaaaaggggggattggggggtacagtgcaggggaaagaatagtagacataatagcaacagacatacaaactaaag

SEQ ID NO: 18218 - DNA, 301 bp, Artificial Sequence
  Nf1.3_NTC.38
  crRNA array
  misc_feature (148)..(157): n is a, c, g, or t
cttggctttatatatcttgtggaaaggacgaaacaccgtaatttctactaagtgtagataatgatggaacgcagtcgcataatttctactaagtgtagataacggagcgcgatactaccataatttctactaagtgtagatttttttnnnnnnnnnnaagcttggcgtggatccgatatcaactagatcttgagacaaatggcagtattcatccacaattttaaaagaaaaggggggattggggggtacagtgcaggggaaagaatagtagacataatagcaacagacatacaaactaaag

SEQ ID NO: 18219 - DNA, 301 bp, Artificial Sequence
  Nf1.3_NTC.39
  crRNA array
  misc_feature (148)..(157): n is a, c, g, or t
cttggctttatatatcttgtggaaaggacgaaacaccgtaatttctactaagtgtagataatgatggaacgcagtcgcataatttctactaagtgtagatccggacgttataacgtttcttaatttctactaagtgtagatttttttnnnnnnnnnnaagcttggcgtggatccgatatcaactagatcttgagacaaatggcagtattcatccacaattttaaaagaaaaggggggattggggggtacagtgcaggggaaagaatagtagacataatagcaacagacatacaaactaaag

SEQ ID NO: 18220 - DNA, 301 bp, Artificial Sequence
  Nf1.3_NTC.4
  crRNA array
  misc_feature (148)..(157): n is a, c, g, or t
cttggctttatatatcttgtggaaaggacgaaacaccgtaatttctactaagtgtagataatgatggaacgcagtcgcataatttctactaagtgtagatatacccgtcgcgaacgtgagtaatttctactaagtgtagatttttttnnnnnnnnnnaagcttggcgtggatccgatatcaactagatcttgagacaaatggcagtattcatccacaattttaaaagaaaaggggggattggggggtacagtgcaggggaaagaatagtagacataatagcaacagacatacaaactaaag

SEQ ID NO: 18221 - DNA, 301 bp, Artificial Sequence
  Nf1.3_NTC.40
  crRNA array
  misc_feature (148)..(157): n is a, c, g, or t
cttggctttatatatcttgtggaaaggacgaaacaccgtaatttctactaagtgtagataatgatggaacgcagtcgcataatttctactaagtgtagatattcgcgaacccggccggaataatttctactaagtgtagatttttttnnnnnnnnnnaagcttggcgtggatccgatatcaactagatcttgagacaaatggcagtattcatccacaattttaaaagaaaaggggggattggggggtacagtgcaggggaaagaatagtagacataatagcaacagacatacaaactaaag

SEQ ID NO: 18222 - DNA, 301 bp, Artificial Sequence
  Nf1.3_NTC.41
  crRNA array
  misc_feature (148)..(157): n is a, c, g, or t
cttggctttatatatcttgtggaaaggacgaaacaccgtaatttctactaagtgtagataatgatggaacgcagtcgcataatttctactaagtgtagatttgatggcgcgacgcgttattaatttctactaagtgtagatttttttnnnnnnnnnnaagcttggcgtggatccgatatcaactagatcttgagacaaatggcagtattcatccacaattttaaaagaaaaggggggattggggggtacagtgcaggggaaagaatagtagacataatagcaacagacatacaaactaaag

SEQ ID NO: 18223 - DNA, 301 bp, Artificial Sequence
  Nf1.3_NTC.42
  crRNA array
  misc_feature (148)..(157): n is a, c, g, or t
cttggctttatatatcttgtggaaaggacgaaacaccgtaatttctactaagtgtagataatgatggaacgcagtcgcataatttctactaagtgtagatggtcaaatcgcggcgataactaatttctactaagtgtagatttttttnnnnnnnnnnaagcttggcgtggatccgatatcaactagatcttgagacaaatggcagtattcatccacaattttaaaagaaaaggggggattggggggtacagtgcaggggaaagaatagtagacataatagcaacagacatacaaactaaag

SEQ ID NO: 18224 - DNA, 301 bp, Artificial Sequence
  Nf1.3_NTC.43
  crRNA array
  misc_feature (148)..(157): n is a, c, g, or t
cttggctttatatatcttgtggaaaggacgaaacaccgtaatttctactaagtgtagataatgatggaacgcagtcgcataatttctactaagtgtagatcgactcgcgcattgaactggtaatttctactaagtgtagatttttttnnnnnnnnnnaagcttggcgtggatccgatatcaactagatcttgagacaaatggcagtattcatccacaattttaaaagaaaaggggggattggggggtacagtgcaggggaaagaatagtagacataatagcaacagacatacaaactaaag

SEQ ID NO: 18225 - DNA, 301 bp, Artificial Sequence
  Nf1.3_NTC.44
  crRNA array
  misc_feature (148)..(157): n is a, c, g, or t
cttggctttatatatcttgtggaaaggacgaaacaccgtaatttctactaagtgtagataatgatggaacgcagtcgcataatttctactaagtgtagatagcgtcgtacgatttatcgttaatttctactaagtgtagatttttttnnnnnnnnnnaagcttggcgtggatccgatatcaactagatcttgagacaaatggcagtattcatccacaattttaaaagaaaaggggggattggggggtacagtgcaggggaaagaatagtagacataatagcaacagacatacaaactaaag

SEQ ID NO: 18226 - DNA, 301 bp, Artificial Sequence
  Nf1.3_NTC.45
  crRNA array
  misc_feature (148)..(157): n is a, c, g, or t
cttggctttatatatcttgtggaaaggacgaaacaccgtaatttctactaagtgtagataatgatggaacgcagtcgcataatttctactaagtgtagatcggaacgcgtgatactagggtaatttctactaagtgtagatttttttnnnnnnnnnnaagcttggcgtggatccgatatcaactagatcttgagacaaatggcagtattcatccacaattttaaaagaaaaggggggattggggggtacagtgcaggggaaagaatagtagacataatagcaacagacatacaaactaaag

SEQ ID NO: 18227 - DNA, 301 bp, Artificial Sequence
  Nf1.3_NTC.46
  crRNA array
  misc_feature (148)..(157): n is a, c, g, or t
cttggctttatatatcttgtggaaaggacgaaacaccgtaatttctactaagtgtagataatgatggaacgcagtcgcataatttctactaagtgtagatagcgggtcgtagacgcgcggtaatttctactaagtgtagatttttttnnnnnnnnnnaagcttggcgtggatccgatatcaactagatcttgagacaaatggcagtattcatccacaattttaaaagaaaaggggggattggggggtacagtgcaggggaaagaatagtagacataatagcaacagacatacaaactaaag

SEQ ID NO: 18228 - DNA, 301 bp, Artificial Sequence
  Nf1.3_NTC.47
  crRNA array
  misc_feature (148)..(157): n is a, c, g, or t
cttggctttatatatcttgtggaaaggacgaaacaccgtaatttctactaagtgtagataatgatggaacgcagtcgcataatttctactaagtgtagattctcgtatcgcgattgttaataatttctactaagtgtagatttttttnnnnnnnnnnaagcttggcgtggatccgatatcaactagatcttgagacaaatggcagtattcatccacaattttaaaagaaaaggggggattggggggtacagtgcaggggaaagaatagtagacataatagcaacagacatacaaactaaag

SEQ ID NO: 18229 - DNA, 301 bp, Artificial Sequence
  Nf1.3_NTC.48
  crRNA array
  misc_feature (148)..(157): n is a, c, g, or t
cttggctttatatatcttgtggaaaggacgaaacaccgtaatttctactaagtgtagataatgatggaacgcagtcgcataatttctactaagtgtagatcggtcgactacggctgttagtaatttctactaagtgtagatttttttnnnnnnnnnnaagcttggcgtggatccgatatcaactagatcttgagacaaatggcagtattcatccacaattttaaaagaaaaggggggattggggggtacagtgcaggggaaagaatagtagacataatagcaacagacatacaaactaaag

SEQ ID NO: 18230 - DNA, 301 bp, Artificial Sequence
  Nf1.3_NTC.49
  crRNA array
  misc_feature (148)..(157): n is a, c, g, or t
cttggctttatatatcttgtggaaaggacgaaacaccgtaatttctactaagtgtagataatgatggaacgcagtcgcataatttctactaagtgtagattcggggcgcgtcaactgaattaatttctactaagtgtagatttttttnnnnnnnnnnaagcttggcgtggatccgatatcaactagatcttgagacaaatggcagtattcatccacaattttaaaagaaaaggggggattggggggtacagtgcaggggaaagaatagtagacataatagcaacagacatacaaactaaag

SEQ ID NO: 18231 - DNA, 301 bp, Artificial Sequence
  Nf1.3_NTC.5
  crRNA array
  misc_feature (148)..(157): n is a, c, g, or t
cttggctttatatatcttgtggaaaggacgaaacaccgtaatttctactaagtgtagataatgatggaacgcagtcgcataatttctactaagtgtagatgcttacgcgtcgcgaatgtataatttctactaagtgtagatttttttnnnnnnnnnnaagcttggcgtggatccgatatcaactagatcttgagacaaatggcagtattcatccacaattttaaaagaaaaggggggattggggggtacagtgcaggggaaagaatagtagacataatagcaacagacatacaaactaaag

SEQ ID NO: 18232 - DNA, 301 bp, Artificial Sequence
  Nf1.3_NTC.50
  crRNA array
  misc_feature (148)..(157): n is a, c, g, or t
cttggctttatatatcttgtggaaaggacgaaacaccgtaatttctactaagtgtagataatgatggaacgcagtcgcataatttctactaagtgtagatattgccgctcgcgcaaaatctaatttctactaagtgtagatttttttnnnnnnnnnnaagcttggcgtggatccgatatcaactagatcttgagacaaatggcagtattcatccacaattttaaaagaaaaggggggattggggggtacagtgcaggggaaagaatagtagacataatagcaacagacatacaaactaaag

SEQ ID NO: 18233 - DNA, 301 bp, Artificial Sequence
  Nf1.3_NTC.51
  crRNA array
  misc_feature (148)..(157): n is a, c, g, or t
cttggctttatatatcttgtggaaaggacgaaacaccgtaatttctactaagtgtagataatgatggaacgcagtcgcataatttctactaagtgtagattaacgcgcaacacgccaatgtaatttctactaagtgtagatttttttnnnnnnnnnnaagcttggcgtggatccgatatcaactagatcttgagacaaatggcagtattcatccacaattttaaaagaaaaggggggattggggggtacagtgcaggggaaagaatagtagacataatagcaacagacatacaaactaaag

SEQ ID NO: 18234 - DNA, 301 bp, Artificial Sequence
  Nf1.3_NTC.6
  crRNA array
  misc_feature (148)..(157): n is a, c, g, or t
cttggctttatatatcttgtggaaaggacgaaacaccgtaatttctactaagtgtagataatgatggaacgcagtcgcataatttctactaagtgtagatcgaatcgcgcctacgggaattaatttctactaagtgtagatttttttnnnnnnnnnnaagcttggcgtggatccgatatcaactagatcttgagacaaatggcagtattcatccacaattttaaaagaaaaggggggattggggggtacagtgcaggggaaagaatagtagacataatagcaacagacatacaaactaaag

SEQ ID NO: 18235 - DNA, 301 bp, Artificial Sequence
  Nf1.3_NTC.7
  crRNA array
  misc_feature (148)..(157): n is a, c, g, or t
cttggctttatatatcttgtggaaaggacgaaacaccgtaatttctactaagtgtagataatgatggaacgcagtcgcataatttctactaagtgtagatcgccgaacggataagactattaatttctactaagtgtagatttttttnnnnnnnnnnaagcttggcgtggatccgatatcaactagatcttgagacaaatggcagtattcatccacaattttaaaagaaaaggggggattggggggtacagtgcaggggaaagaatagtagacataatagcaacagacatacaaactaaag

SEQ ID NO: 18236 - DNA, 301 bp, Artificial Sequence
  Nf1.3_NTC.8
  crRNA array
  misc_feature (148)..(157): n is a, c, g, or t
cttggctttatatatcttgtggaaaggacgaaacaccgtaatttctactaagtgtagataatgatggaacgcagtcgcataatttctactaagtgtagatcgaccgaggttacgctgggataatttctactaagtgtagatttttttnnnnnnnnnnaagcttggcgtggatccgatatcaactagatcttgagacaaatggcagtattcatccacaattttaaaagaaaaggggggattggggggtacagtgcaggggaaagaatagtagacataatagcaacagacatacaaactaaag

SEQ ID NO: 18237 - DNA, 301 bp, Artificial Sequence
  Nf1.3_NTC.9
  crRNA array
  misc_feature (148)..(157): n is a, c, g, or t
cttggctttatatatcttgtggaaaggacgaaacaccgtaatttctactaagtgtagataatgatggaacgcagtcgcataatttctactaagtgtagatatcgccgtacggctatggcataatttctactaagtgtagatttttttnnnnnnnnnnaagcttggcgtggatccgatatcaactagatcttgagacaaatggcagtattcatccacaattttaaaagaaaaggggggattggggggtacagtgcaggggaaagaatagtagacataatagcaacagacatacaaactaaag

SEQ ID NO: 18238 - DNA, 301 bp, Artificial Sequence
  Nf1.4_NTC.0
  crRNA array
  misc_feature (148)..(157): n is a, c, g, or t
cttggctttatatatcttgtggaaaggacgaaacaccgtaatttctactaagtgtagattgcaaaaccatccaccaagttaatttctactaagtgtagattatagcgtcgcgcgctaatttaatttctactaagtgtagatttttttnnnnnnnnnnaagcttggcgtggatccgatatcaactagatcttgagacaaatggcagtattcatccacaattttaaaagaaaaggggggattggggggtacagtgcaggggaaagaatagtagacataatagcaacagacatacaaactaaag

SEQ ID NO: 18239 - DNA, 301 bp, Artificial Sequence
  Nf1.4_NTC.1
  crRNA array
  misc_feature (148)..(157): n is a, c, g, or t
cttggctttatatatcttgtggaaaggacgaaacaccgtaatttctactaagtgtagattgcaaaaccatccaccaagttaatttctactaagtgtagatcgcgtaaccgttccggctcctaatttctactaagtgtagatttttttnnnnnnnnnnaagcttggcgtggatccgatatcaactagatcttgagacaaatggcagtattcatccacaattttaaaagaaaaggggggattggggggtacagtgcaggggaaagaatagtagacataatagcaacagacatacaaactaaag

SEQ ID NO: 18240 - DNA, 301 bp, Artificial Sequence
  Nf1.4_NTC.10
  crRNA array
  misc_feature (148)..(157): n is a, c, g, or t
cttggctttatatatcttgtggaaaggacgaaacaccgtaatttctactaagtgtagattgcaaaaccatccaccaagttaatttctactaagtgtagatcgctaagttcgcgcgggccgtaatttctactaagtgtagatttttttnnnnnnnnnnaagcttggcgtggatccgatatcaactagatcttgagacaaatggcagtattcatccacaattttaaaagaaaaggggggattggggggtacagtgcaggggaaagaatagtagacataatagcaacagacatacaaactaaag

SEQ ID NO: 18241 - DNA, 301 bp, Artificial Sequence
  Nf1.4_NTC.11
  crRNA array
  misc_feature (148)..(157): n is a, c, g, or t
cttggctttatatatcttgtggaaaggacgaaacaccgtaatttctactaagtgtagattgcaaaaccatccaccaagttaatttctactaagtgtagatcgttcgtcgacgaagcaatctaatttctactaagtgtagatttttttnnnnnnnnnnaagcttggcgtggatccgatatcaactagatcttgagacaaatggcagtattcatccacaattttaaaagaaaaggggggattggggggtacagtgcaggggaaagaatagtagacataatagcaacagacatacaaactaaag

SEQ ID NO: 18242 - DNA, 301 bp, Artificial Sequence
  Nf1.4_NTC.12
  crRNA array
  misc_feature (148)..(157): n is a, c, g, or t
cttggctttatatatcttgtggaaaggacgaaacaccgtaatttctactaagtgtagattgcaaaaccatccaccaagttaatttctactaagtgtagatcgccgacgattaatcaatagtaatttctactaagtgtagatttttttnnnnnnnnnnaagcttggcgtggatccgatatcaactagatcttgagacaaatggcagtattcatccacaattttaaaagaaaaggggggattggggggtacagtgcaggggaaagaatagtagacataatagcaacagacatacaaactaaag

SEQ ID NO: 18243 - DNA, 301 bp, Artificial Sequence
  Nf1.4_NTC.13
  crRNA array
  misc_feature (148)..(157): n is a, c, g, or t
cttggctttatatatcttgtggaaaggacgaaacaccgtaatttctactaagtgtagattgcaaaaccatccaccaagttaatttctactaagtgtagatgaccgttgtatcgcgatcaataatttctactaagtgtagatttttttnnnnnnnnnnaagcttggcgtggatccgatatcaactagatcttgagacaaatggcagtattcatccacaattttaaaagaaaaggggggattggggggtacagtgcaggggaaagaatagtagacataatagcaacagacatacaaactaaag

SEQ ID NO: 18244 - DNA, 301 bp, Artificial Sequence
  Nf1.4_NTC.14
  crRNA array
  misc_feature (148)..(157): n is a, c, g, or t
cttggctttatatatcttgtggaaaggacgaaacaccgtaatttctactaagtgtagattgcaaaaccatccaccaagttaatttctactaagtgtagatccgttcgtgcgatagtgttttaatttctactaagtgtagatttttttnnnnnnnnnnaagcttggcgtggatccgatatcaactagatcttgagacaaatggcagtattcatccacaattttaaaagaaaaggggggattggggggtacagtgcaggggaaagaatagtagacataatagcaacagacatacaaactaaag

SEQ ID NO: 18245 - DNA, 301 bp, Artificial Sequence
  Nf1.4_NTC.15
  crRNA array
  misc_feature (148)..(157): n is a, c, g, or t
cttggctttatatatcttgtggaaaggacgaaacaccgtaatttctactaagtgtagattgcaaaaccatccaccaagttaatttctactaagtgtagatgttgtcgtgccgcgaatttataatttctactaagtgtagatttttttnnnnnnnnnnaagcttggcgtggatccgatatcaactagatcttgagacaaatggcagtattcatccacaattttaaaagaaaaggggggattggggggtacagtgcaggggaaagaatagtagacataatagcaacagacatacaaactaaag

SEQ ID NO: 18246 - DNA, 301 bp, Artificial Sequence
  Nf1.4_NTC.16
  crRNA array
  misc_feature (148)..(157): n is a, c, g, or t
cttggctttatatatcttgtggaaaggacgaaacaccgtaatttctactaagtgtagattgcaaaaccatccaccaagttaatttctactaagtgtagatcggtacgttagacgaaaatttaatttctactaagtgtagatttttttnnnnnnnnnnaagcttggcgtggatccgatatcaactagatcttgagacaaatggcagtattcatccacaattttaaaagaaaaggggggattggggggtacagtgcaggggaaagaatagtagacataatagcaacagacatacaaactaaag

SEQ ID NO: 18247 - DNA, 301 bp, Artificial Sequence
  Nf1.4_NTC.17
  crRNA array
  misc_feature (148)..(157): n is a, c, g, or t
cttggctttatatatcttgtggaaaggacgaaacaccgtaatttctactaagtgtagattgcaaaaccatccaccaagttaatttctactaagtgtagattatcgaacgctatcgaacgttaatttctactaagtgtagatttttttnnnnnnnnnnaagcttggcgtggatccgatatcaactagatcttgagacaaatggcagtattcatccacaattttaaaagaaaaggggggattggggggtacagtgcaggggaaagaatagtagacataatagcaacagacatacaaactaaag

SEQ ID NO: 18248 - DNA, 301 bp, Artificial Sequence
  Nf1.4_NTC.18
  crRNA array
  misc_feature (148)..(157): n is a, c, g, or t
cttggctttatatatcttgtggaaaggacgaaacaccgtaatttctactaagtgtagattgcaaaaccatccaccaagttaatttctactaagtgtagattccggttacgaccggcaaaataatttctactaagtgtagatttttttnnnnnnnnnnaagcttggcgtggatccgatatcaactagatcttgagacaaatggcagtattcatccacaattttaaaagaaaaggggggattggggggtacagtgcaggggaaagaatagtagacataatagcaacagacatacaaactaaag

SEQ ID NO: 18249 - DNA, 301 bp, Artificial Sequence
  Nf1.4_NTC.19
  crRNA array
  misc_feature (148)..(157): n is a, c, g, or t
cttggctttatatatcttgtggaaaggacgaaacaccgtaatttctactaagtgtagattgcaaaaccatccaccaagttaatttctactaagtgtagatcgtcgtagaacgatacccgataatttctactaagtgtagatttttttnnnnnnnnnnaagcttggcgtggatccgatatcaactagatcttgagacaaatggcagtattcatccacaattttaaaagaaaaggggggattggggggtacagtgcaggggaaagaatagtagacataatagcaacagacatacaaactaaag

SEQ ID NO: 18250 - DNA, 301 bp, Artificial Sequence
  Nf1.4_NTC.2
  crRNA array
  misc_feature (148)..(157): n is a, c, g, or t
cttggctttatatatcttgtggaaaggacgaaacaccgtaatttctactaagtgtagattgcaaaaccatccaccaagttaatttctactaagtgtagatttatgtcgcgccgcgacccgtaatttctactaagtgtagatttttttnnnnnnnnnnaagcttggcgtggatccgatatcaactagatcttgagacaaatggcagtattcatccacaattttaaaagaaaaggggggattggggggtacagtgcaggggaaagaatagtagacataatagcaacagacatacaaactaaag

SEQ ID NO: 18251 - DNA, 301 bp, Artificial Sequence
  Nf1.4_NTC.20
  crRNA array
  misc_feature (148)..(157): n is a, c, g, or t
cttggctttatatatcttgtggaaaggacgaaacaccgtaatttctactaagtgtagattgcaaaaccatccaccaagttaatttctactaagtgtagatattccggcgcgaccagaagataatttctactaagtgtagatttttttnnnnnnnnnnaagcttggcgtggatccgatatcaactagatcttgagacaaatggcagtattcatccacaattttaaaagaaaaggggggattggggggtacagtgcaggggaaagaatagtagacataatagcaacagacatacaaactaaag

SEQ ID NO: 18252 - DNA, 301 bp, Artificial Sequence
  Nf1.4_NTC.21
  crRNA array
  misc_feature (148)..(157): n is a, c, g, or t
cttggctttatatatcttgtggaaaggacgaaacaccgtaatttctactaagtgtagattgcaaaaccatccaccaagttaatttctactaagtgtagatgtataacttcgcgcggtccgtaatttctactaagtgtagatttttttnnnnnnnnnnaagcttggcgtggatccgatatcaactagatcttgagacaaatggcagtattcatccacaattttaaaagaaaaggggggattggggggtacagtgcaggggaaagaatagtagacataatagcaacagacatacaaactaaag

SEQ ID NO: 18253 - DNA, 301 bp, Artificial Sequence
  Nf1.4_NTC.22
  crRNA array
  misc_feature (148)..(157): n is a, c, g, or t
cttggctttatatatcttgtggaaaggacgaaacaccgtaatttctactaagtgtagattgcaaaaccatccaccaagttaatttctactaagtgtagatgcgcgtcaacgtaatgtgcctaatttctactaagtgtagatttttttnnnnnnnnnnaagcttggcgtggatccgatatcaactagatcttgagacaaatggcagtattcatccacaattttaaaagaaaaggggggattggggggtacagtgcaggggaaagaatagtagacataatagcaacagacatacaaactaaag

SEQ ID NO: 18254 - DNA, 301 bp, Artificial Sequence
  Nf1.4_NTC.23
  crRNA array
  misc_feature (148)..(157): n is a, c, g, or t
cttggctttatatatcttgtggaaaggacgaaacaccgtaatttctactaagtgtagattgcaaaaccatccaccaagttaatttctactaagtgtagatacgcgctattatcgtaggtgtaatttctactaagtgtagatttttttnnnnnnnnnnaagcttggcgtggatccgatatcaactagatcttgagacaaatggcagtattcatccacaattttaaaagaaaaggggggattggggggtacagtgcaggggaaagaatagtagacataatagcaacagacatacaaactaaag

SEQ ID NO: 18255 - DNA, 301 bp, Artificial Sequence
  Nf1.4_NTC.24
  crRNA array
  misc_feature (148)..(157): n is a, c, g, or t
cttggctttatatatcttgtggaaaggacgaaacaccgtaatttctactaagtgtagattgcaaaaccatccaccaagttaatttctactaagtgtagatactatcgacgttcgtcccggtaatttctactaagtgtagatttttttnnnnnnnnnnaagcttggcgtggatccgatatcaactagatcttgagacaaatggcagtattcatccacaattttaaaagaaaaggggggattggggggtacagtgcaggggaaagaatagtagacataatagcaacagacatacaaactaaag

SEQ ID NO: 18256 - DNA, 301 bp, Artificial Sequence
  Nf1.4_NTC.25
  crRNA array
  misc_feature (148)..(157): n is a, c, g, or t
cttggctttatatatcttgtggaaaggacgaaacaccgtaatttctactaagtgtagattgcaaaaccatccaccaagttaatttctactaagtgtagattcgcgttatcgtgccgtgcgtaatttctactaagtgtagatttttttnnnnnnnnnnaagcttggcgtggatccgatatcaactagatcttgagacaaatggcagtattcatccacaattttaaaagaaaaggggggattggggggtacagtgcaggggaaagaatagtagacataatagcaacagacatacaaactaaag

SEQ ID NO: 18257 - DNA, 301 bp, Artificial Sequence
  Nf1.4_NTC.26
  crRNA array
  misc_feature (148)..(157): n is a, c, g, or t
cttggctttatatatcttgtggaaaggacgaaacaccgtaatttctactaagtgtagattgcaaaaccatccaccaagttaatttctactaagtgtagatcgcgacggcggttttaacactaatttctactaagtgtagatttttttnnnnnnnnnnaagcttggcgtggatccgatatcaactagatcttgagacaaatggcagtattcatccacaattttaaaagaaaaggggggattggggggtacagtgcaggggaaagaatagtagacataatagcaacagacatacaaactaaag

SEQ ID NO: 18258 - DNA, 301 bp, Artificial Sequence
  Nf1.4_NTC.27
  crRNA array
  misc_feature (148)..(157): n is a, c, g, or t
cttggctttatatatcttgtggaaaggacgaaacaccgtaatttctactaagtgtagattgcaaaaccatccaccaagttaatttctactaagtgtagatgtcgcgttgcgaccggcgcttaatttctactaagtgtagatttttttnnnnnnnnnnaagcttggcgtggatccgatatcaactagatcttgagacaaatggcagtattcatccacaattttaaaagaaaaggggggattggggggtacagtgcaggggaaagaatagtagacataatagcaacagacatacaaactaaag

SEQ ID NO: 18259 - DNA, 301 bp, Artificial Sequence
  Nf1.4_NTC.28
  crRNA array
  misc_feature (148)..(157): n is a, c, g, or t
cttggctttatatatcttgtggaaaggacgaaacaccgtaatttctactaagtgtagattgcaaaaccatccaccaagttaatttctactaagtgtagataccgctaatcggcgtaaacttaatttctactaagtgtagatttttttnnnnnnnnnnaagcttggcgtggatccgatatcaactagatcttgagacaaatggcagtattcatccacaattttaaaagaaaaggggggattggggggtacagtgcaggggaaagaatagtagacataatagcaacagacatacaaactaaag

SEQ ID NO: 18260 - DNA, 301 bp, Artificial Sequence
  Nf1.4_NTC.29
  crRNA array
  misc_feature (148)..(157): n is a, c, g, or t
cttggctttatatatcttgtggaaaggacgaaacaccgtaatttctactaagtgtagattgcaaaaccatccaccaagttaatttctactaagtgtagatcgcgatctataccgtctatataatttctactaagtgtagatttttttnnnnnnnnnnaagcttggcgtggatccgatatcaactagatcttgagacaaatggcagtattcatccacaattttaaaagaaaaggggggattggggggtacagtgcaggggaaagaatagtagacataatagcaacagacatacaaactaaag

SEQ ID NO: 18261 - DNA, 301 bp, Artificial Sequence
  Nf1.4_NTC.3
  crRNA array
  misc_feature (148)..(157): n is a, c, g, or t
cttggctttatatatcttgtggaaaggacgaaacaccgtaatttctactaagtgtagattgcaaaaccatccaccaagttaatttctactaagtgtagattcgacgcgagacgacgtacataatttctactaagtgtagatttttttnnnnnnnnnnaagcttggcgtggatccgatatcaactagatcttgagacaaatggcagtattcatccacaattttaaaagaaaaggggggattggggggtacagtgcaggggaaagaatagtagacataatagcaacagacatacaaactaaag

SEQ ID NO: 18262 - DNA, 301 bp, Artificial Sequence
  Nf1.4_NTC.30
  crRNA array
  misc_feature (148)..(157): n is a, c, g, or t
cttggctttatatatcttgtggaaaggacgaaacaccgtaatttctactaagtgtagattgcaaaaccatccaccaagttaatttctactaagtgtagatcgatcgtacgggtgtcctaataatttctactaagtgtagatttttttnnnnnnnnnnaagcttggcgtggatccgatatcaactagatcttgagacaaatggcagtattcatccacaattttaaaagaaaaggggggattggggggtacagtgcaggggaaagaatagtagacataatagcaacagacatacaaactaaag

SEQ ID NO: 18263 - DNA, 301 bp, Artificial Sequence
  Nf1.4_NTC.31
  crRNA array
  misc_feature (148)..(157): n is a, c, g, or t
cttggctttatatatcttgtggaaaggacgaaacaccgtaatttctactaagtgtagattgcaaaaccatccaccaagttaatttctactaagtgtagatgccgaccgcgtgattgtaggtaatttctactaagtgtagatttttttnnnnnnnnnnaagcttggcgtggatccgatatcaactagatcttgagacaaatggcagtattcatccacaattttaaaagaaaaggggggattggggggtacagtgcaggggaaagaatagtagacataatagcaacagacatacaaactaaag

SEQ ID NO: 18264 - DNA, 301 bp, Artificial Sequence
  Nf1.4_NTC.32
  crRNA array
  misc_feature (148)..(157): n is a, c, g, or t
cttggctttatatatcttgtggaaaggacgaaacaccgtaatttctactaagtgtagattgcaaaaccatccaccaagttaatttctactaagtgtagatgcacgttacgcccgggtcactaatttctactaagtgtagatttttttnnnnnnnnnnaagcttggcgtggatccgatatcaactagatcttgagacaaatggcagtattcatccacaattttaaaagaaaaggggggattggggggtacagtgcaggggaaagaatagtagacataatagcaacagacatacaaactaaag

SEQ ID NO: 18265 - DNA, 301 bp, Artificial Sequence
  Nf1.4_NTC.33
  crRNA array
  misc_feature (148)..(157): n is a, c, g, or t
cttggctttatatatcttgtggaaaggacgaaacaccgtaatttctactaagtgtagattgcaaaaccatccaccaagttaatttctactaagtgtagattaagcgaccgacgcattcgctaatttctactaagtgtagatttttttnnnnnnnnnnaagcttggcgtggatccgatatcaactagatcttgagacaaatggcagtattcatccacaattttaaaagaaaaggggggattggggggtacagtgcaggggaaagaatagtagacataatagcaacagacatacaaactaaag

SEQ ID NO: 18266 - DNA, 301 bp, Artificial Sequence
  Nf1.4_NTC.34
  crRNA array
  misc_feature (148)..(157): n is a, c, g, or t
cttggctttatatatcttgtggaaaggacgaaacaccgtaatttctactaagtgtagattgcaaaaccatccaccaagttaatttctactaagtgtagattagcgttcgacacgtgaaactaatttctactaagtgtagatttttttnnnnnnnnnnaagcttggcgtggatccgatatcaactagatcttgagacaaatggcagtattcatccacaattttaaaagaaaaggggggattggggggtacagtgcaggggaaagaatagtagacataatagcaacagacatacaaactaaag

SEQ ID NO: 18267 - DNA, 301 bp, Artificial Sequence
  Nf1.4_NTC.35
  crRNA array
  misc_feature (148)..(157): n is a, c, g, or t
cttggctttatatatcttgtggaaaggacgaaacaccgtaatttctactaagtgtagattgcaaaaccatccaccaagttaatttctactaagtgtagattggcgcgtaatcgctattcgtaatttctactaagtgtagatttttttnnnnnnnnnnaagcttggcgtggatccgatatcaactagatcttgagacaaatggcagtattcatccacaattttaaaagaaaaggggggattggggggtacagtgcaggggaaagaatagtagacataatagcaacagacatacaaactaaag

SEQ ID NO: 18268 - DNA, 301 bp, Artificial Sequence
  Nf1.4_NTC.36
  crRNA array
  misc_feature (148)..(157): n is a, c, g, or t
cttggctttatatatcttgtggaaaggacgaaacaccgtaatttctactaagtgtagattgcaaaaccatccaccaagttaatttctactaagtgtagatcaacccgccgtagcgggccttaatttctactaagtgtagatttttttnnnnnnnnnnaagcttggcgtggatccgatatcaactagatcttgagacaaatggcagtattcatccacaattttaaaagaaaaggggggattggggggtacagtgcaggggaaagaatagtagacataatagcaacagacatacaaactaaag

SEQ ID NO: 18269 - DNA, 301 bp, Artificial Sequence
  Nf1.4_NTC.37
  crRNA array
  misc_feature (148)..(157): n is a, c, g, or t
cttggctttatatatcttgtggaaaggacgaaacaccgtaatttctactaagtgtagattgcaaaaccatccaccaagttaatttctactaagtgtagattttgcgttgacgcgattacttaatttctactaagtgtagatttttttnnnnnnnnnnaagcttggcgtggatccgatatcaactagatcttgagacaaatggcagtattcatccacaattttaaaagaaaaggggggattggggggtacagtgcaggggaaagaatagtagacataatagcaacagacatacaaactaaag

SEQ ID NO: 18270 - DNA, 301 bp, Artificial Sequence
  Nf1.4_NTC.38
  crRNA array
  misc_feature (148)..(157): n is a, c, g, or t
cttggctttatatatcttgtggaaaggacgaaacaccgtaatttctactaagtgtagattgcaaaaccatccaccaagttaatttctactaagtgtagataacggagcgcgatactaccataatttctactaagtgtagatttttttnnnnnnnnnnaagcttggcgtggatccgatatcaactagatcttgagacaaatggcagtattcatccacaattttaaaagaaaaggggggattggggggtacagtgcaggggaaagaatagtagacataatagcaacagacatacaaactaaag

SEQ ID NO: 18271 - DNA, 301 bp, Artificial Sequence
  Nf1.4_NTC.39
  crRNA array
  misc_feature (148)..(157): n is a, c, g, or t
cttggctttatatatcttgtggaaaggacgaaacaccgtaatttctactaagtgtagattgcaaaaccatccaccaagttaatttctactaagtgtagatccggacgttataacgtttcttaatttctactaagtgtagatttttttnnnnnnnnnnaagcttggcgtggatccgatatcaactagatcttgagacaaatggcagtattcatccacaattttaaaagaaaaggggggattggggggtacagtgcaggggaaagaatagtagacataatagcaacagacatacaaactaaag

SEQ ID NO: 18272 - DNA, 301 bp, Artificial Sequence
  Nf1.4_NTC.4
  crRNA array
  misc_feature (148)..(157): n is a, c, g, or t
cttggctttatatatcttgtggaaaggacgaaacaccgtaatttctactaagtgtagattgcaaaaccatccaccaagttaatttctactaagtgtagatatacccgtcgcgaacgtgagtaatttctactaagtgtagatttttttnnnnnnnnnnaagcttggcgtggatccgatatcaactagatcttgagacaaatggcagtattcatccacaattttaaaagaaaaggggggattggggggtacagtgcaggggaaagaatagtagacataatagcaacagacatacaaactaaag

SEQ ID NO: 18273 - DNA, 301 bp, Artificial Sequence
  Nf1.4_NTC.40
  crRNA array
  misc_feature (148)..(157): n is a, c, g, or t
cttggctttatatatcttgtggaaaggacgaaacaccgtaatttctactaagtgtagattgcaaaaccatccaccaagttaatttctactaagtgtagatattcgcgaacccggccggaataatttctactaagtgtagatttttttnnnnnnnnnnaagcttggcgtggatccgatatcaactagatcttgagacaaatggcagtattcatccacaattttaaaagaaaaggggggattggggggtacagtgcaggggaaagaatagtagacataatagcaacagacatacaaactaaag

SEQ ID NO: 18274 - DNA, 301 bp, Artificial Sequence
  Nf1.4_NTC.41
  crRNA array
  misc_feature (148)..(157): n is a, c, g, or t
cttggctttatatatcttgtggaaaggacgaaacaccgtaatttctactaagtgtagattgcaaaaccatccaccaagttaatttctactaagtgtagatttgatggcgcgacgcgttattaatttctactaagtgtagatttttttnnnnnnnnnnaagcttggcgtggatccgatatcaactagatcttgagacaaatggcagtattcatccacaattttaaaagaaaaggggggattggggggtacagtgcaggggaaagaatagtagacataatagcaacagacatacaaactaaag

SEQ ID NO: 18275 - DNA, 301 bp, Artificial Sequence
  Nf1.4_NTC.42
  crRNA array
  misc_feature (148)..(157): n is a, c, g, or t
cttggctttatatatcttgtggaaaggacgaaacaccgtaatttctactaagtgtagattgcaaaaccatccaccaagttaatttctactaagtgtagatggtcaaatcgcggcgataactaatttctactaagtgtagatttttttnnnnnnnnnnaagcttggcgtggatccgatatcaactagatcttgagacaaatggcagtattcatccacaattttaaaagaaaaggggggattggggggtacagtgcaggggaaagaatagtagacataatagcaacagacatacaaactaaag

SEQ ID NO: 18276 - DNA, 301 bp, Artificial Sequence
  Nf1.4_NTC.43
  crRNA array
  misc_feature (148)..(157): n is a, c, g, or t
cttggctttatatatcttgtggaaaggacgaaacaccgtaatttctactaagtgtagattgcaaaaccatccaccaagttaatttctactaagtgtagatcgactcgcgcattgaactggtaatttctactaagtgtagatttttttnnnnnnnnnnaagcttggcgtggatccgatatcaactagatcttgagacaaatggcagtattcatccacaattttaaaagaaaaggggggattggggggtacagtgcaggggaaagaatagtagacataatagcaacagacatacaaactaaag

SEQ ID NO: 18277 - DNA, 301 bp, Artificial Sequence
  Nf1.4_NTC.44
  crRNA array
  misc_feature (148)..(157): n is a, c, g, or t
cttggctttatatatcttgtggaaaggacgaaacaccgtaatttctactaagtgtagattgcaaaaccatccaccaagttaatttctactaagtgtagatagcgtcgtacgatttatcgttaatttctactaagtgtagatttttttnnnnnnnnnnaagcttggcgtggatccgatatcaactagatcttgagacaaatggcagtattcatccacaattttaaaagaaaaggggggattggggggtacagtgcaggggaaagaatagtagacataatagcaacagacatacaaactaaag

SEQ ID NO: 18278 - DNA, 301 bp, Artificial Sequence
  Nf1.4_NTC.45
  crRNA array
  misc_feature (148)..(157): n is a, c, g, or t
cttggctttatatatcttgtggaaaggacgaaacaccgtaatttctactaagtgtagattgcaaaaccatccaccaagttaatttctactaagtgtagatcggaacgcgtgatactagggtaatttctactaagtgtagatttttttnnnnnnnnnnaagcttggcgtggatccgatatcaactagatcttgagacaaatggcagtattcatccacaattttaaaagaaaaggggggattggggggtacagtgcaggggaaagaatagtagacataatagcaacagacatacaaactaaag

SEQ ID NO: 18279 - DNA, 301 bp, Artificial Sequence
  Nf1.4_NTC.46
  crRNA array
  misc_feature (148)..(157): n is a, c, g, or t
cttggctttatatatcttgtggaaaggacgaaacaccgtaatttctactaagtgtagattgcaaaaccatccaccaagttaatttctactaagtgtagatagcgggtcgtagacgcgcggtaatttctactaagtgtagatttttttnnnnnnnnnnaagcttggcgtggatccgatatcaactagatcttgagacaaatggcagtattcatccacaattttaaaagaaaaggggggattggggggtacagtgcaggggaaagaatagtagacataatagcaacagacatacaaactaaag

SEQ ID NO: 18280 - DNA, 301 bp, Artificial Sequence
  Nf1.4_NTC.47
  crRNA array
  misc_feature (148)..(157): n is a, c, g, or t
cttggctttatatatcttgtggaaaggacgaaacaccgtaatttctactaagtgtagattgcaaaaccatccaccaagttaatttctactaagtgtagattctcgtatcgcgattgttaataatttctactaagtgtagatttttttnnnnnnnnnnaagcttggcgtggatccgatatcaactagatcttgagacaaatggcagtattcatccacaattttaaaagaaaaggggggattggggggtacagtgcaggggaaagaatagtagacataatagcaacagacatacaaactaaag

SEQ ID NO: 18281 - DNA, 301 bp, Artificial Sequence
  Nf1.4_NTC.48
  crRNA array
  misc_feature (148)..(157): n is a, c, g, or t
cttggctttatatatcttgtggaaaggacgaaacaccgtaatttctactaagtgtagattgcaaaaccatccaccaagttaatttctactaagtgtagatcggtcgactacggctgttagtaatttctactaagtgtagatttttttnnnnnnnnnnaagcttggcgtggatccgatatcaactagatcttgagacaaatggcagtattcatccacaattttaaaagaaaaggggggattggggggtacagtgcaggggaaagaatagtagacataatagcaacagacatacaaactaaag

SEQ ID NO: 18282 - DNA, 301 bp, Artificial Sequence
  Nf1.4_NTC.49
  crRNA array
  misc_feature (148)..(157): n is a, c, g, or t
cttggctttatatatcttgtggaaaggacgaaacaccgtaatttctactaagtgtagattgcaaaaccatccaccaagttaatttctactaagtgtagattcggggcgcgtcaactgaattaatttctactaagtgtagatttttttnnnnnnnnnnaagcttggcgtggatccgatatcaactagatcttgagacaaatggcagtattcatccacaattttaaaagaaaaggggggattggggggtacagtgcaggggaaagaatagtagacataatagcaacagacatacaaactaaag

SEQ ID NO: 18283 - DNA, 301 bp, Artificial Sequence
  Nf1.4_NTC.5
  crRNA array
  misc_feature (148)..(157): n is a, c, g, or t
cttggctttatatatcttgtggaaaggacgaaacaccgtaatttctactaagtgtagattgcaaaaccatccaccaagttaatttctactaagtgtagatgcttacgcgtcgcgaatgtataatttctactaagtgtagatttttttnnnnnnnnnnaagcttggcgtggatccgatatcaactagatcttgagacaaatggcagtattcatccacaattttaaaagaaaaggggggattggggggtacagtgcaggggaaagaatagtagacataatagcaacagacatacaaactaaag

SEQ ID NO: 18284 - DNA, 301 bp, Artificial Sequence
  Nf1.4_NTC.50
  crRNA array
  misc_feature (148)..(157): n is a, c, g, or t
cttggctttatatatcttgtggaaaggacgaaacaccgtaatttctactaagtgtagattgcaaaaccatccaccaagttaatttctactaagtgtagatattgccgctcgcgcaaaatctaatttctactaagtgtagatttttttnnnnnnnnnnaagcttggcgtggatccgatatcaactagatcttgagacaaatggcagtattcatccacaattttaaaagaaaaggggggattggggggtacagtgcaggggaaagaatagtagacataatagcaacagacatacaaactaaag

SEQ ID NO: 18285 - DNA, 301 bp, Artificial Sequence
  Nf1.4_NTC.51
  crRNA array
  misc_feature (148)..(157): n is a, c, g, or t
cttggctttatatatcttgtggaaaggacgaaacaccgtaatttctactaagtgtagattgcaaaaccatccaccaagttaatttctactaagtgtagattaacgcgcaacacgccaatgtaatttctactaagtgtagatttttttnnnnnnnnnnaagcttggcgtggatccgatatcaactagatcttgagacaaatggcagtattcatccacaattttaaaagaaaaggggggattggggggtacagtgcaggggaaagaatagtagacataatagcaacagacatacaaactaaag

SEQ ID NO: 18286 - DNA, 301 bp, Artificial Sequence
  Nf1.4_NTC.6
  crRNA array
  misc_feature (148)..(157): n is a, c, g, or t
cttggctttatatatcttgtggaaaggacgaaacaccgtaatttctactaagtgtagattgcaaaaccatccaccaagttaatttctactaagtgtagatcgaatcgcgcctacgggaattaatttctactaagtgtagatttttttnnnnnnnnnnaagcttggcgtggatccgatatcaactagatcttgagacaaatggcagtattcatccacaattttaaaagaaaaggggggattggggggtacagtgcaggggaaagaatagtagacataatagcaacagacatacaaactaaag

SEQ ID NO: 18287 - DNA, 301 bp, Artificial Sequence
  Nf1.4_NTC.7
  crRNA array
  misc_feature (148)..(157): n is a, c, g, or t
cttggctttatatatcttgtggaaaggacgaaacaccgtaatttctactaagtgtagattgcaaaaccatccaccaagttaatttctactaagtgtagatcgccgaacggataagactattaatttctactaagtgtagatttttttnnnnnnnnnnaagcttggcgtggatccgatatcaactagatcttgagacaaatggcagtattcatccacaattttaaaagaaaaggggggattggggggtacagtgcaggggaaagaatagtagacataatagcaacagacatacaaactaaag

SEQ ID NO: 18288 - DNA, 301 bp, Artificial Sequence
  Nf1.4_NTC.8
  crRNA array
  misc_feature (148)..(157): n is a, c, g, or t
cttggctttatatatcttgtggaaaggacgaaacaccgtaatttctactaagtgtagattgcaaaaccatccaccaagttaatttctactaagtgtagatcgaccgaggttacgctgggataatttctactaagtgtagatttttttnnnnnnnnnnaagcttggcgtggatccgatatcaactagatcttgagacaaatggcagtattcatccacaattttaaaagaaaaggggggattggggggtacagtgcaggggaaagaatagtagacataatagcaacagacatacaaactaaag

SEQ ID NO: 18289 - DNA, 301 bp, Artificial Sequence
  Nf1.4_NTC.9
  crRNA array
  misc_feature (148)..(157): n is a, c, g, or t
cttggctttatatatcttgtggaaaggacgaaacaccgtaatttctactaagtgtagattgcaaaaccatccaccaagttaatttctactaagtgtagatatcgccgtacggctatggcataatttctactaagtgtagatttttttnnnnnnnnnnaagcttggcgtggatccgatatcaactagatcttgagacaaatggcagtattcatccacaattttaaaagaaaaggggggattggggggtacagtgcaggggaaagaatagtagacataatagcaacagacatacaaactaaag

SEQ ID NO: 18290 - DNA, 301 bp, Artificial Sequence
  Nf2.1_NTC.0
  crRNA array
  misc_feature (148)..(157): n is a, c, g, or t
cttggctttatatatcttgtggaaaggacgaaacaccgtaatttctactaagtgtagatcggagtcatctgatagagattaatttctactaagtgtagattatagcgtcgcgcgctaatttaatttctactaagtgtagatttttttnnnnnnnnnnaagcttggcgtggatccgatatcaactagatcttgagacaaatggcagtattcatccacaattttaaaagaaaaggggggattggggggtacagtgcaggggaaagaatagtagacataatagcaacagacatacaaactaaag

SEQ ID NO: 18291 - DNA, 301 bp, Artificial Sequence
  Nf2.1_NTC.1
  crRNA array
  misc_feature (148)..(157): n is a, c, g, or t
cttggctttatatatcttgtggaaaggacgaaacaccgtaatttctactaagtgtagatcggagtcatctgatagagattaatttctactaagtgtagatcgcgtaaccgttccggctcctaatttctactaagtgtagatttttttnnnnnnnnnnaagcttggcgtggatccgatatcaactagatcttgagacaaatggcagtattcatccacaattttaaaagaaaaggggggattggggggtacagtgcaggggaaagaatagtagacataatagcaacagacatacaaactaaag

SEQ ID NO: 18292 - DNA, 301 bp, Artificial Sequence
  Nf2.1_NTC.10
  crRNA array
  misc_feature (148)..(157): n is a, c, g, or t
cttggctttatatatcttgtggaaaggacgaaacaccgtaatttctactaagtgtagatcggagtcatctgatagagattaatttctactaagtgtagatcgctaagttcgcgcgggccgtaatttctactaagtgtagatttttttnnnnnnnnnnaagcttggcgtggatccgatatcaactagatcttgagacaaatggcagtattcatccacaattttaaaagaaaaggggggattggggggtacagtgcaggggaaagaatagtagacataatagcaacagacatacaaactaaag

SEQ ID NO: 18293 - DNA, 301 bp, Artificial Sequence
  Nf2.1_NTC.11
  crRNA array
  misc_feature (148)..(157): n is a, c, g, or t
cttggctttatatatcttgtggaaaggacgaaacaccgtaatttctactaagtgtagatcggagtcatctgatagagattaatttctactaagtgtagatcgttcgtcgacgaagcaatctaatttctactaagtgtagatttttttnnnnnnnnnnaagcttggcgtggatccgatatcaactagatcttgagacaaatggcagtattcatccacaattttaaaagaaaaggggggattggggggtacagtgcaggggaaagaatagtagacataatagcaacagacatacaaactaaag

SEQ ID NO: 18294 - DNA, 301 bp, Artificial Sequence
  Nf2.1_NTC.12
  crRNA array
  misc_feature (148)..(157): n is a, c, g, or t
cttggctttatatatcttgtggaaaggacgaaacaccgtaatttctactaagtgtagatcggagtcatctgatagagattaatttctactaagtgtagatcgccgacgattaatcaatagtaatttctactaagtgtagatttttttnnnnnnnnnnaagcttggcgtggatccgatatcaactagatcttgagacaaatggcagtattcatccacaattttaaaagaaaaggggggattggggggtacagtgcaggggaaagaatagtagacataatagcaacagacatacaaactaaag

SEQ ID NO: 18295 - DNA, 301 bp, Artificial Sequence
  Nf2.1_NTC.13
  crRNA array
  misc_feature (148)..(157): n is a, c, g, or t
cttggctttatatatcttgtggaaaggacgaaacaccgtaatttctactaagtgtagatcggagtcatctgatagagattaatttctactaagtgtagatgaccgttgtatcgcgatcaataatttctactaagtgtagatttttttnnnnnnnnnnaagcttggcgtggatccgatatcaactagatcttgagacaaatggcagtattcatccacaattttaaaagaaaaggggggattggggggtacagtgcaggggaaagaatagtagacataatagcaacagacatacaaactaaag

SEQ ID NO: 18296 - DNA, 301 bp, Artificial Sequence
  Nf2.1_NTC.14
  crRNA array
  misc_feature (148)..(157): n is a, c, g, or t
cttggctttatatatcttgtggaaaggacgaaacaccgtaatttctactaagtgtagatcggagtcatctgatagagattaatttctactaagtgtagatccgttcgtgcgatagtgttttaatttctactaagtgtagatttttttnnnnnnnnnnaagcttggcgtggatccgatatcaactagatcttgagacaaatggcagtattcatccacaattttaaaagaaaaggggggattggggggtacagtgcaggggaaagaatagtagacataatagcaacagacatacaaactaaag

SEQ ID NO: 18297 - DNA, 301 bp, Artificial Sequence
  Nf2.1_NTC.15
  crRNA array
  misc_feature (148)..(157): n is a, c, g, or t
cttggctttatatatcttgtggaaaggacgaaacaccgtaatttctactaagtgtagatcggagtcatctgatagagattaatttctactaagtgtagatgttgtcgtgccgcgaatttataatttctactaagtgtagatttttttnnnnnnnnnnaagcttggcgtggatccgatatcaactagatcttgagacaaatggcagtattcatccacaattttaaaagaaaaggggggattggggggtacagtgcaggggaaagaatagtagacataatagcaacagacatacaaactaaag

SEQ ID NO: 18298 - DNA, 301 bp, Artificial Sequence
  Nf2.1_NTC.16
  crRNA array
  misc_feature (148)..(157): n is a, c, g, or t
cttggctttatatatcttgtggaaaggacgaaacaccgtaatttctactaagtgtagatcggagtcatctgatagagattaatttctactaagtgtagatcggtacgttagacgaaaatttaatttctactaagtgtagatttttttnnnnnnnnnnaagcttggcgtggatccgatatcaactagatcttgagacaaatggcagtattcatccacaattttaaaagaaaaggggggattggggggtacagtgcaggggaaagaatagtagacataatagcaacagacatacaaactaaag

SEQ ID NO: 18299 - DNA, 301 bp, Artificial Sequence
  Nf2.1_NTC.17
  crRNA array
  misc_feature (148)..(157): n is a, c, g, or t
cttggctttatatatcttgtggaaaggacgaaacaccgtaatttctactaagtgtagatcggagtcatctgatagagattaatttctactaagtgtagattatcgaacgctatcgaacgttaatttctactaagtgtagatttttttnnnnnnnnnnaagcttggcgtggatccgatatcaactagatcttgagacaaatggcagtattcatccacaattttaaaagaaaaggggggattggggggtacagtgcaggggaaagaatagtagacataatagcaacagacatacaaactaaag

SEQ ID NO: 18300 - DNA, 301 bp, Artificial Sequence
  Nf2.1_NTC.18
  crRNA array
  misc_feature (148)..(157): n is a, c, g, or t
cttggctttatatatcttgtggaaaggacgaaacaccgtaatttctactaagtgtagatcggagtcatctgatagagattaatttctactaagtgtagattccggttacgaccggcaaaataatttctactaagtgtagatttttttnnnnnnnnnnaagcttggcgtggatccgatatcaactagatcttgagacaaatggcagtattcatccacaattttaaaagaaaaggggggattggggggtacagtgcaggggaaagaatagtagacataatagcaacagacatacaaactaaag

SEQ ID NO: 18301 - DNA, 301 bp, Artificial Sequence
  Nf2.1_NTC.19
  crRNA array
  misc_feature (148)..(157): n is a, c, g, or t
cttggctttatatatcttgtggaaaggacgaaacaccgtaatttctactaagtgtagatcggagtcatctgatagagattaatttctactaagtgtagatcgtcgtagaacgatacccgataatttctactaagtgtagatttttttnnnnnnnnnnaagcttggcgtggatccgatatcaactagatcttgagacaaatggcagtattcatccacaattttaaaagaaaaggggggattggggggtacagtgcaggggaaagaatagtagacataatagcaacagacatacaaactaaag

SEQ ID NO: 18302 - DNA, 301 bp, Artificial Sequence
  Nf2.1_NTC.2
  crRNA array
  misc_feature (148)..(157): n is a, c, g, or t
cttggctttatatatcttgtggaaaggacgaaacaccgtaatttctactaagtgtagatcggagtcatctgatagagattaatttctactaagtgtagatttatgtcgcgccgcgacccgtaatttctactaagtgtagatttttttnnnnnnnnnnaagcttggcgtggatccgatatcaactagatcttgagacaaatggcagtattcatccacaattttaaaagaaaaggggggattggggggtacagtgcaggggaaagaatagtagacataatagcaacagacatacaaactaaag

SEQ ID NO: 18303 - DNA, 301 bp, Artificial Sequence
  Nf2.1_NTC.20
  crRNA array
  misc_feature (148)..(157): n is a, c, g, or t
cttggctttatatatcttgtggaaaggacgaaacaccgtaatttctactaagtgtagatcggagtcatctgatagagattaatttctactaagtgtagatattccggcgcgaccagaagataatttctactaagtgtagatttttttnnnnnnnnnnaagcttggcgtggatccgatatcaactagatcttgagacaaatggcagtattcatccacaattttaaaagaaaaggggggattggggggtacagtgcaggggaaagaatagtagacataatagcaacagacatacaaactaaag

SEQ ID NO: 18304 - DNA, 301 bp, Artificial Sequence
  Nf2.1_NTC.21
  crRNA array
  misc_feature (148)..(157): n is a, c, g, or t
cttggctttatatatcttgtggaaaggacgaaacaccgtaatttctactaagtgtagatcggagtcatctgatagagattaatttctactaagtgtagatgtataacttcgcgcggtccgtaatttctactaagtgtagatttttttnnnnnnnnnnaagcttggcgtggatccgatatcaactagatcttgagacaaatggcagtattcatccacaattttaaaagaaaaggggggattggggggtacagtgcaggggaaagaatagtagacataatagcaacagacatacaaactaaag

SEQ ID NO: 18305 - DNA, 301 bp, Artificial Sequence
  Nf2.1_NTC.22
  crRNA array
  misc_feature (148)..(157): n is a, c, g, or t
cttggctttatatatcttgtggaaaggacgaaacaccgtaatttctactaagtgtagatcggagtcatctgatagagattaatttctactaagtgtagatgcgcgtcaacgtaatgtgcctaatttctactaagtgtagatttttttnnnnnnnnnnaagcttggcgtggatccgatatcaactagatcttgagacaaatggcagtattcatccacaattttaaaagaaaaggggggattggggggtacagtgcaggggaaagaatagtagacataatagcaacagacatacaaactaaag

SEQ ID NO: 18306 - DNA, 301 bp, Artificial Sequence
  Nf2.1_NTC.23
  crRNA array
  misc_feature (148)..(157): n is a, c, g, or t
cttggctttatatatcttgtggaaaggacgaaacaccgtaatttctactaagtgtagatcggagtcatctgatagagattaatttctactaagtgtagatacgcgctattatcgtaggtgtaatttctactaagtgtagatttttttnnnnnnnnnnaagcttggcgtggatccgatatcaactagatcttgagacaaatggcagtattcatccacaattttaaaagaaaaggggggattggggggtacagtgcaggggaaagaatagtagacataatagcaacagacatacaaactaaag

SEQ ID NO: 18307 - DNA, 301 bp, Artificial Sequence
  Nf2.1_NTC.24
  crRNA array
  misc_feature (148)..(157): n is a, c, g, or t
cttggctttatatatcttgtggaaaggacgaaacaccgtaatttctactaagtgtagatcggagtcatctgatagagattaatttctactaagtgtagatactatcgacgttcgtcccggtaatttctactaagtgtagatttttttnnnnnnnnnnaagcttggcgtggatccgatatcaactagatcttgagacaaatggcagtattcatccacaattttaaaagaaaaggggggattggggggtacagtgcaggggaaagaatagtagacataatagcaacagacatacaaactaaag

SEQ ID NO: 18308 - DNA, 301 bp, Artificial Sequence
  Nf2.1_NTC.25
  crRNA array
  misc_feature (148)..(157): n is a, c, g, or t
cttggctttatatatcttgtggaaaggacgaaacaccgtaatttctactaagtgtagatcggagtcatctgatagagattaatttctactaagtgtagattcgcgttatcgtgccgtgcgtaatttctactaagtgtagatttttttnnnnnnnnnnaagcttggcgtggatccgatatcaactagatcttgagacaaatggcagtattcatccacaattttaaaagaaaaggggggattggggggtacagtgcaggggaaagaatagtagacataatagcaacagacatacaaactaaag

SEQ ID NO: 18309 - DNA, 301 bp, Artificial Sequence
  Nf2.1_NTC.26
  crRNA array
  misc_feature (148)..(157): n is a, c, g, or t
cttggctttatatatcttgtggaaaggacgaaacaccgtaatttctactaagtgtagatcggagtcatctgatagagattaatttctactaagtgtagatcgcgacggcggttttaacactaatttctactaagtgtagatttttttnnnnnnnnnnaagcttggcgtggatccgatatcaactagatcttgagacaaatggcagtattcatccacaattttaaaagaaaaggggggattggggggtacagtgcaggggaaagaatagtagacataatagcaacagacatacaaactaaag

SEQ ID NO: 18310 - DNA, 301 bp, Artificial Sequence
  Nf2.1_NTC.27
  crRNA array
  misc_feature (148)..(157): n is a, c, g, or t
cttggctttatatatcttgtggaaaggacgaaacaccgtaatttctactaagtgtagatcggagtcatctgatagagattaatttctactaagtgtagatgtcgcgttgcgaccggcgcttaatttctactaagtgtagatttttttnnnnnnnnnnaagcttggcgtggatccgatatcaactagatcttgagacaaatggcagtattcatccacaattttaaaagaaaaggggggattggggggtacagtgcaggggaaagaatagtagacataatagcaacagacatacaaactaaag

SEQ ID NO: 18311 - DNA, 301 bp, Artificial Sequence
  Nf2.1_NTC.28
  crRNA array
  misc_feature (148)..(157): n is a, c, g, or t
cttggctttatatatcttgtggaaaggacgaaacaccgtaatttctactaagtgtagatcggagtcatctgatagagattaatttctactaagtgtagataccgctaatcggcgtaaacttaatttctactaagtgtagatttttttnnnnnnnnnnaagcttggcgtggatccgatatcaactagatcttgagacaaatggcagtattcatccacaattttaaaagaaaaggggggattggggggtacagtgcaggggaaagaatagtagacataatagcaacagacatacaaactaaag

SEQ ID NO: 18312 - DNA, 301 bp, Artificial Sequence
  Nf2.1_NTC.29
  crRNA array
  misc_feature (148)..(157): n is a, c, g, or t
cttggctttatatatcttgtggaaaggacgaaacaccgtaatttctactaagtgtagatcggagtcatctgatagagattaatttctactaagtgtagatcgcgatctataccgtctatataatttctactaagtgtagatttttttnnnnnnnnnnaagcttggcgtggatccgatatcaactagatcttgagacaaatggcagtattcatccacaattttaaaagaaaaggggggattggggggtacagtgcaggggaaagaatagtagacataatagcaacagacatacaaactaaag

SEQ ID NO: 18313 - DNA, 301 bp, Artificial Sequence
  Nf2.1_NTC.3
  crRNA array
  misc_feature (148)..(157): n is a, c, g, or t
cttggctttatatatcttgtggaaaggacgaaacaccgtaatttctactaagtgtagatcggagtcatctgatagagattaatttctactaagtgtagattcgacgcgagacgacgtacataatttctactaagtgtagatttttttnnnnnnnnnnaagcttggcgtggatccgatatcaactagatcttgagacaaatggcagtattcatccacaattttaaaagaaaaggggggattggggggtacagtgcaggggaaagaatagtagacataatagcaacagacatacaaactaaag

SEQ ID NO: 18314 - DNA, 301 bp, Artificial Sequence
  Nf2.1_NTC.30
  crRNA array
  misc_feature (148)..(157): n is a, c, g, or t
cttggctttatatatcttgtggaaaggacgaaacaccgtaatttctactaagtgtagatcggagtcatctgatagagattaatttctactaagtgtagatcgatcgtacgggtgtcctaataatttctactaagtgtagatttttttnnnnnnnnnnaagcttggcgtggatccgatatcaactagatcttgagacaaatggcagtattcatccacaattttaaaagaaaaggggggattggggggtacagtgcaggggaaagaatagtagacataatagcaacagacatacaaactaaag

SEQ ID NO: 18315 - DNA, 301 bp, Artificial Sequence
  Nf2.1_NTC.31
  crRNA array
  misc_feature (148)..(157): n is a, c, g, or t
cttggctttatatatcttgtggaaaggacgaaacaccgtaatttctactaagtgtagatcggagtcatctgatagagattaatttctactaagtgtagatgccgaccgcgtgattgtaggtaatttctactaagtgtagatttttttnnnnnnnnnnaagcttggcgtggatccgatatcaactagatcttgagacaaatggcagtattcatccacaattttaaaagaaaaggggggattggggggtacagtgcaggggaaagaatagtagacataatagcaacagacatacaaactaaag

SEQ ID NO: 18316 - DNA, 301 bp, Artificial Sequence
  Nf2.1_NTC.32
  crRNA array
  misc_feature (148)..(157): n is a, c, g, or t
cttggctttatatatcttgtggaaaggacgaaacaccgtaatttctactaagtgtagatcggagtcatctgatagagattaatttctactaagtgtagatgcacgttacgcccgggtcactaatttctactaagtgtagatttttttnnnnnnnnnnaagcttggcgtggatccgatatcaactagatcttgagacaaatggcagtattcatccacaattttaaaagaaaaggggggattggggggtacagtgcaggggaaagaatagtagacataatagcaacagacatacaaactaaag

SEQ ID NO: 18317 - DNA, 301 bp, Artificial Sequence
  Nf2.1_NTC.33
  crRNA array
  misc_feature (148)..(157): n is a, c, g, or t
cttggctttatatatcttgtggaaaggacgaaacaccgtaatttctactaagtgtagatcggagtcatctgatagagattaatttctactaagtgtagattaagcgaccgacgcattcgctaatttctactaagtgtagatttttttnnnnnnnnnnaagcttggcgtggatccgatatcaactagatcttgagacaaatggcagtattcatccacaattttaaaagaaaaggggggattggggggtacagtgcaggggaaagaatagtagacataatagcaacagacatacaaactaaag

SEQ ID NO: 18318 - DNA, 301 bp, Artificial Sequence
  Nf2.1_NTC.34
  crRNA array
  misc_feature (148)..(157): n is a, c, g, or t
cttggctttatatatcttgtggaaaggacgaaacaccgtaatttctactaagtgtagatcggagtcatctgatagagattaatttctactaagtgtagattagcgttcgacacgtgaaactaatttctactaagtgtagatttttttnnnnnnnnnnaagcttggcgtggatccgatatcaactagatcttgagacaaatggcagtattcatccacaattttaaaagaaaaggggggattggggggtacagtgcaggggaaagaatagtagacataatagcaacagacatacaaactaaag

SEQ ID NO: 18319 - DNA, 301 bp, Artificial Sequence
  Nf2.1_NTC.35
  crRNA array
  misc_feature (148)..(157): n is a, c, g, or t
cttggctttatatatcttgtggaaaggacgaaacaccgtaatttctactaagtgtagatcggagtcatctgatagagattaatttctactaagtgtagattggcgcgtaatcgctattcgtaatttctactaagtgtagatttttttnnnnnnnnnnaagcttggcgtggatccgatatcaactagatcttgagacaaatggcagtattcatccacaattttaaaagaaaaggggggattggggggtacagtgcaggggaaagaatagtagacataatagcaacagacatacaaactaaag

SEQ ID NO: 18320 - DNA, 301 bp, Artificial Sequence
  Nf2.1_NTC.36
  crRNA array
  misc_feature (148)..(157): n is a, c, g, or t
cttggctttatatatcttgtggaaaggacgaaacaccgtaatttctactaagtgtagatcggagtcatctgatagagattaatttctactaagtgtagatcaacccgccgtagcgggccttaatttctactaagtgtagatttttttnnnnnnnnnnaagcttggcgtggatccgatatcaactagatcttgagacaaatggcagtattcatccacaattttaaaagaaaaggggggattggggggtacagtgcaggggaaagaatagtagacataatagcaacagacatacaaactaaag

SEQ ID NO: 18321 - DNA, 301 bp, Artificial Sequence
  Nf2.1_NTC.37
  crRNA array
  misc_feature (148)..(157): n is a, c, g, or t
cttggctttatatatcttgtggaaaggacgaaacaccgtaatttctactaagtgtagatcggagtcatctgatagagattaatttctactaagtgtagattttgcgttgacgcgattacttaatttctactaagtgtagatttttttnnnnnnnnnnaagcttggcgtggatccgatatcaactagatcttgagacaaatggcagtattcatccacaattttaaaagaaaaggggggattggggggtacagtgcaggggaaagaatagtagacataatagcaacagacatacaaactaaag

SEQ ID NO: 18322 - DNA, 301 bp, Artificial Sequence
  Nf2.1_NTC.38
  crRNA array
  misc_feature (148)..(157): n is a, c, g, or t
cttggctttatatatcttgtggaaaggacgaaacaccgtaatttctactaagtgtagatcggagtcatctgatagagattaatttctactaagtgtagataacggagcgcgatactaccataatttctactaagtgtagatttttttnnnnnnnnnnaagcttggcgtggatccgatatcaactagatcttgagacaaatggcagtattcatccacaattttaaaagaaaaggggggattggggggtacagtgcaggggaaagaatagtagacataatagcaacagacatacaaactaaag

SEQ ID NO: 18323 - DNA, 301 bp, Artificial Sequence
  Nf2.1_NTC.39
  crRNA array
  misc_feature (148)..(157): n is a, c, g, or t
cttggctttatatatcttgtggaaaggacgaaacaccgtaatttctactaagtgtagatcggagtcatctgatagagattaatttctactaagtgtagatccggacgttataacgtttcttaatttctactaagtgtagatttttttnnnnnnnnnnaagcttggcgtggatccgatatcaactagatcttgagacaaatggcagtattcatccacaattttaaaagaaaaggggggattggggggtacagtgcaggggaaagaatagtagacataatagcaacagacatacaaactaaag

SEQ ID NO: 18324 - DNA, 301 bp, Artificial Sequence
  Nf2.1_NTC.4
  crRNA array
  misc_feature (148)..(157): n is a, c, g, or t
cttggctttatatatcttgtggaaaggacgaaacaccgtaatttctactaagtgtagatcggagtcatctgatagagattaatttctactaagtgtagatatacccgtcgcgaacgtgagtaatttctactaagtgtagatttttttnnnnnnnnnnaagcttggcgtggatccgatatcaactagatcttgagacaaatggcagtattcatccacaattttaaaagaaaaggggggattggggggtacagtgcaggggaaagaatagtagacataatagcaacagacatacaaactaaag

SEQ ID NO: 18325 - DNA, 301 bp, Artificial Sequence
  Nf2.1_NTC.40
  crRNA array
  misc_feature (148)..(157): n is a, c, g, or t
cttggctttatatatcttgtggaaaggacgaaacaccgtaatttctactaagtgtagatcggagtcatctgatagagattaatttctactaagtgtagatattcgcgaacccggccggaataatttctactaagtgtagatttttttnnnnnnnnnnaagcttggcgtggatccgatatcaactagatcttgagacaaatggcagtattcatccacaattttaaaagaaaaggggggattggggggtacagtgcaggggaaagaatagtagacataatagcaacagacatacaaactaaag

SEQ ID NO: 18326 - DNA, 301 bp, Artificial Sequence
  Nf2.1_NTC.41
  crRNA array
  misc_feature (148)..(157): n is a, c, g, or t
cttggctttatatatcttgtggaaaggacgaaacaccgtaatttctactaagtgtagatcggagtcatctgatagagattaatttctactaagtgtagatttgatggcgcgacgcgttattaatttctactaagtgtagatttttttnnnnnnnnnnaagcttggcgtggatccgatatcaactagatcttgagacaaatggcagtattcatccacaattttaaaagaaaaggggggattggggggtacagtgcaggggaaagaatagtagacataatagcaacagacatacaaactaaag

SEQ ID NO: 18327 - DNA, 301 bp, Artificial Sequence
  Nf2.1_NTC.42
  crRNA array
  misc_feature (148)..(157): n is a, c, g, or t
cttggctttatatatcttgtggaaaggacgaaacaccgtaatttctactaagtgtagatcggagtcatctgatagagattaatttctactaagtgtagatggtcaaatcgcggcgataactaatttctactaagtgtagatttttttnnnnnnnnnnaagcttggcgtggatccgatatcaactagatcttgagacaaatggcagtattcatccacaattttaaaagaaaaggggggattggggggtacagtgcaggggaaagaatagtagacataatagcaacagacatacaaactaaag

SEQ ID NO: 18328 - DNA, 301 bp, Artificial Sequence
  Nf2.1_NTC.43
  crRNA array
  misc_feature (148)..(157): n is a, c, g, or t
cttggctttatatatcttgtggaaaggacgaaacaccgtaatttctactaagtgtagatcggagtcatctgatagagattaatttctactaagtgtagatcgactcgcgcattgaactggtaatttctactaagtgtagatttttttnnnnnnnnnnaagcttggcgtggatccgatatcaactagatcttgagacaaatggcagtattcatccacaattttaaaagaaaaggggggattggggggtacagtgcaggggaaagaatagtagacataatagcaacagacatacaaactaaag

SEQ ID NO: 18329 - DNA, 301 bp, Artificial Sequence
  Nf2.1_NTC.44
  crRNA array
  misc_feature (148)..(157): n is a, c, g, or t
cttggctttatatatcttgtggaaaggacgaaacaccgtaatttctactaagtgtagatcggagtcatctgatagagattaatttctactaagtgtagatagcgtcgtacgatttatcgttaatttctactaagtgtagatttttttnnnnnnnnnnaagcttggcgtggatccgatatcaactagatcttgagacaaatggcagtattcatccacaattttaaaagaaaaggggggattggggggtacagtgcaggggaaagaatagtagacataatagcaacagacatacaaactaaag

SEQ ID NO: 18330 - DNA, 301 bp, Artificial Sequence
  Nf2.1_NTC.45
  crRNA array
  misc_feature (148)..(157): n is a, c, g, or t
cttggctttatatatcttgtggaaaggacgaaacaccgtaatttctactaagtgtagatcggagtcatctgatagagattaatttctactaagtgtagatcggaacgcgtgatactagggtaatttctactaagtgtagatttttttnnnnnnnnnnaagcttggcgtggatccgatatcaactagatcttgagacaaatggcagtattcatccacaattttaaaagaaaaggggggattggggggtacagtgcaggggaaagaatagtagacataatagcaacagacatacaaactaaag

SEQ ID NO: 18331 - DNA, 301 bp, Artificial Sequence
  Nf2.1_NTC.46
  crRNA array
  misc_feature (148)..(157): n is a, c, g, or t
cttggctttatatatcttgtggaaaggacgaaacaccgtaatttctactaagtgtagatcggagtcatctgatagagattaatttctactaagtgtagatagcgggtcgtagacgcgcggtaatttctactaagtgtagatttttttnnnnnnnnnnaagcttggcgtggatccgatatcaactagatcttgagacaaatggcagtattcatccacaattttaaaagaaaaggggggattggggggtacagtgcaggggaaagaatagtagacataatagcaacagacatacaaactaaag

SEQ ID NO: 18332 - DNA, 301 bp, Artificial Sequence
  Nf2.1_NTC.47
  crRNA array
  misc_feature (148)..(157): n is a, c, g, or t
cttggctttatatatcttgtggaaaggacgaaacaccgtaatttctactaagtgtagatcggagtcatctgatagagattaatttctactaagtgtagattctcgtatcgcgattgttaataatttctactaagtgtagatttttttnnnnnnnnnnaagcttggcgtggatccgatatcaactagatcttgagacaaatggcagtattcatccacaattttaaaagaaaaggggggattggggggtacagtgcaggggaaagaatagtagacataatagcaacagacatacaaactaaag

SEQ ID NO: 18333 - DNA, 301 bp, Artificial Sequence
  Nf2.1_NTC.48
  crRNA array
  misc_feature (148)..(157): n is a, c, g, or t
cttggctttatatatcttgtggaaaggacgaaacaccgtaatttctactaagtgtagatcggagtcatctgatagagattaatttctactaagtgtagatcggtcgactacggctgttagtaatttctactaagtgtagatttttttnnnnnnnnnnaagcttggcgtggatccgatatcaactagatcttgagacaaatggcagtattcatccacaattttaaaagaaaaggggggattggggggtacagtgcaggggaaagaatagtagacataatagcaacagacatacaaactaaag

SEQ ID NO: 18334 - DNA, 301 bp, Artificial Sequence
  Nf2.1_NTC.49
  crRNA array
  misc_feature (148)..(157): n is a, c, g, or t
cttggctttatatatcttgtggaaaggacgaaacaccgtaatttctactaagtgtagatcggagtcatctgatagagattaatttctactaagtgtagattcggggcgcgtcaactgaattaatttctactaagtgtagatttttttnnnnnnnnnnaagcttggcgtggatccgatatcaactagatcttgagacaaatggcagtattcatccacaattttaaaagaaaaggggggattggggggtacagtgcaggggaaagaatagtagacataatagcaacagacatacaaactaaag

SEQ ID NO: 18335 - DNA, 301 bp, Artificial Sequence
  Nf2.1_NTC.5
  crRNA array
  misc_feature (148)..(157): n is a, c, g, or t
cttggctttatatatcttgtggaaaggacgaaacaccgtaatttctactaagtgtagatcggagtcatctgatagagattaatttctactaagtgtagatgcttacgcgtcgcgaatgtataatttctactaagtgtagatttttttnnnnnnnnnnaagcttggcgtggatccgatatcaactagatcttgagacaaatggcagtattcatccacaattttaaaagaaaaggggggattggggggtacagtgcaggggaaagaatagtagacataatagcaacagacatacaaactaaag

SEQ ID NO: 18336 - DNA, 301 bp, Artificial Sequence
  Nf2.1_NTC.50
  crRNA array
  misc_feature (148)..(157): n is a, c, g, or t
cttggctttatatatcttgtggaaaggacgaaacaccgtaatttctactaagtgtagatcggagtcatctgatagagattaatttctactaagtgtagatattgccgctcgcgcaaaatctaatttctactaagtgtagatttttttnnnnnnnnnnaagcttggcgtggatccgatatcaactagatcttgagacaaatggcagtattcatccacaattttaaaagaaaaggggggattggggggtacagtgcaggggaaagaatagtagacataatagcaacagacatacaaactaaag

SEQ ID NO: 18337 - DNA, 301 bp, Artificial Sequence
  Nf2.1_NTC.51
  crRNA array
  misc_feature (148)..(157): n is a, c, g, or t
cttggctttatatatcttgtggaaaggacgaaacaccgtaatttctactaagtgtagatcggagtcatctgatagagattaatttctactaagtgtagattaacgcgcaacacgccaatgtaatttctactaagtgtagatttttttnnnnnnnnnnaagcttggcgtggatccgatatcaactagatcttgagacaaatggcagtattcatccacaattttaaaagaaaaggggggattggggggtacagtgcaggggaaagaatagtagacataatagcaacagacatacaaactaaag

SEQ ID NO: 18338 - DNA, 301 bp, Artificial Sequence
  Nf2.1_NTC.6
  crRNA array
  misc_feature (148)..(157): n is a, c, g, or t
cttggctttatatatcttgtggaaaggacgaaacaccgtaatttctactaagtgtagatcggagtcatctgatagagattaatttctactaagtgtagatcgaatcgcgcctacgggaattaatttctactaagtgtagatttttttnnnnnnnnnnaagcttggcgtggatccgatatcaactagatcttgagacaaatggcagtattcatccacaattttaaaagaaaaggggggattggggggtacagtgcaggggaaagaatagtagacataatagcaacagacatacaaactaaag

SEQ ID NO: 18339 - DNA, 301 bp, Artificial Sequence
  Nf2.1_NTC.7
  crRNA array
  misc_feature (148)..(157): n is a, c, g, or t
cttggctttatatatcttgtggaaaggacgaaacaccgtaatttctactaagtgtagatcggagtcatctgatagagattaatttctactaagtgtagatcgccgaacggataagactattaatttctactaagtgtagatttttttnnnnnnnnnnaagcttggcgtggatccgatatcaactagatcttgagacaaatggcagtattcatccacaattttaaaagaaaaggggggattggggggtacagtgcaggggaaagaatagtagacataatagcaacagacatacaaactaaag

SEQ ID NO: 18340 - DNA, 301 bp, Artificial Sequence
  Nf2.1_NTC.8
  crRNA array
  misc_feature (148)..(157): n is a, c, g, or t
cttggctttatatatcttgtggaaaggacgaaacaccgtaatttctactaagtgtagatcggagtcatctgatagagattaatttctactaagtgtagatcgaccgaggttacgctgggataatttctactaagtgtagatttttttnnnnnnnnnnaagcttggcgtggatccgatatcaactagatcttgagacaaatggcagtattcatccacaattttaaaagaaaaggggggattggggggtacagtgcaggggaaagaatagtagacataatagcaacagacatacaaactaaag

SEQ ID NO: 18341 - DNA, 301 bp, Artificial Sequence
  Nf2.1_NTC.9
  crRNA array
  misc_feature (148)..(157): n is a, c, g, or t
cttggctttatatatcttgtggaaaggacgaaacaccgtaatttctactaagtgtagatcggagtcatctgatagagattaatttctactaagtgtagatatcgccgtacggctatggcataatttctactaagtgtagatttttttnnnnnnnnnnaagcttggcgtggatccgatatcaactagatcttgagacaaatggcagtattcatccacaattttaaaagaaaaggggggattggggggtacagtgcaggggaaagaatagtagacataatagcaacagacatacaaactaaag

SEQ ID NO: 18342 - DNA, 301 bp, Artificial Sequence
  Nf2.2_NTC.0
  crRNA array
  misc_feature (148)..(157): n is a, c, g, or t
cttggctttatatatcttgtggaaaggacgaaacaccgtaatttctactaagtgtagattgaggcgacggaaagctgactaatttctactaagtgtagattatagcgtcgcgcgctaatttaatttctactaagtgtagatttttttnnnnnnnnnnaagcttggcgtggatccgatatcaactagatcttgagacaaatggcagtattcatccacaattttaaaagaaaaggggggattggggggtacagtgcaggggaaagaatagtagacataatagcaacagacatacaaactaaag

SEQ ID NO: 18343 - DNA, 301 bp, Artificial Sequence
  Nf2.2_NTC.1
  crRNA array
  misc_feature (148)..(157): n is a, c, g, or t
cttggctttatatatcttgtggaaaggacgaaacaccgtaatttctactaagtgtagattgaggcgacggaaagctgactaatttctactaagtgtagatcgcgtaaccgttccggctcctaatttctactaagtgtagatttttttnnnnnnnnnnaagcttggcgtggatccgatatcaactagatcttgagacaaatggcagtattcatccacaattttaaaagaaaaggggggattggggggtacagtgcaggggaaagaatagtagacataatagcaacagacatacaaactaaag

SEQ ID NO: 18344 - DNA, 301 bp, Artificial Sequence
  Nf2.2_NTC.10
  crRNA array
  misc_feature (148)..(157): n is a, c, g, or t
cttggctttatatatcttgtggaaaggacgaaacaccgtaatttctactaagtgtagattgaggcgacggaaagctgactaatttctactaagtgtagatcgctaagttcgcgcgggccgtaatttctactaagtgtagatttttttnnnnnnnnnnaagcttggcgtggatccgatatcaactagatcttgagacaaatggcagtattcatccacaattttaaaagaaaaggggggattggggggtacagtgcaggggaaagaatagtagacataatagcaacagacatacaaactaaag

SEQ ID NO: 18345 - DNA, 301 bp, Artificial Sequence
  Nf2.2_NTC.11
  crRNA array
  misc_feature (148)..(157): n is a, c, g, or t
cttggctttatatatcttgtggaaaggacgaaacaccgtaatttctactaagtgtagattgaggcgacggaaagctgactaatttctactaagtgtagatcgttcgtcgacgaagcaatctaatttctactaagtgtagatttttttnnnnnnnnnnaagcttggcgtggatccgatatcaactagatcttgagacaaatggcagtattcatccacaattttaaaagaaaaggggggattggggggtacagtgcaggggaaagaatagtagacataatagcaacagacatacaaactaaag

SEQ ID NO: 18346 - DNA, 301 bp, Artificial Sequence
  Nf2.2_NTC.12
  crRNA array
  misc_feature (148)..(157): n is a, c, g, or t
cttggctttatatatcttgtggaaaggacgaaacaccgtaatttctactaagtgtagattgaggcgacggaaagctgactaatttctactaagtgtagatcgccgacgattaatcaatagtaatttctactaagtgtagatttttttnnnnnnnnnnaagcttggcgtggatccgatatcaactagatcttgagacaaatggcagtattcatccacaattttaaaagaaaaggggggattggggggtacagtgcaggggaaagaatagtagacataatagcaacagacatacaaactaaag

SEQ ID NO: 18347 - DNA, 301 bp, Artificial Sequence
  Nf2.2_NTC.13
  crRNA array
  misc_feature (148)..(157): n is a, c, g, or t
cttggctttatatatcttgtggaaaggacgaaacaccgtaatttctactaagtgtagattgaggcgacggaaagctgactaatttctactaagtgtagatgaccgttgtatcgcgatcaataatttctactaagtgtagatttttttnnnnnnnnnnaagcttggcgtggatccgatatcaactagatcttgagacaaatggcagtattcatccacaattttaaaagaaaaggggggattggggggtacagtgcaggggaaagaatagtagacataatagcaacagacatacaaactaaag

SEQ ID NO: 18348 - DNA, 301 bp, Artificial Sequence
  Nf2.2_NTC.14
  crRNA array
  misc_feature (148)..(157): n is a, c, g, or t
cttggctttatatatcttgtggaaaggacgaaacaccgtaatttctactaagtgtagattgaggcgacggaaagctgactaatttctactaagtgtagatccgttcgtgcgatagtgttttaatttctactaagtgtagatttttttnnnnnnnnnnaagcttggcgtggatccgatatcaactagatcttgagacaaatggcagtattcatccacaattttaaaagaaaaggggggattggggggtacagtgcaggggaaagaatagtagacataatagcaacagacatacaaactaaag

SEQ ID NO: 18349 - DNA, 301 bp, Artificial Sequence
  Nf2.2_NTC.15
  crRNA array
  misc_feature (148)..(157): n is a, c, g, or t
cttggctttatatatcttgtggaaaggacgaaacaccgtaatttctactaagtgtagattgaggcgacggaaagctgactaatttctactaagtgtagatgttgtcgtgccgcgaatttataatttctactaagtgtagatttttttnnnnnnnnnnaagcttggcgtggatccgatatcaactagatcttgagacaaatggcagtattcatccacaattttaaaagaaaaggggggattggggggtacagtgcaggggaaagaatagtagacataatagcaacagacatacaaactaaag

SEQ ID NO: 18350 - DNA, 301 bp, Artificial Sequence
  Nf2.2_NTC.16
  crRNA array
  misc_feature (148)..(157): n is a, c, g, or t
cttggctttatatatcttgtggaaaggacgaaacaccgtaatttctactaagtgtagattgaggcgacggaaagctgactaatttctactaagtgtagatcggtacgttagacgaaaatttaatttctactaagtgtagatttttttnnnnnnnnnnaagcttggcgtggatccgatatcaactagatcttgagacaaatggcagtattcatccacaattttaaaagaaaaggggggattggggggtacagtgcaggggaaagaatagtagacataatagcaacagacatacaaactaaag

SEQ ID NO: 18351 - DNA, 301 bp, Artificial Sequence
  Nf2.2_NTC.17
  crRNA array
  misc_feature (148)..(157): n is a, c, g, or t
cttggctttatatatcttgtggaaaggacgaaacaccgtaatttctactaagtgtagattgaggcgacggaaagctgactaatttctactaagtgtagattatcgaacgctatcgaacgttaatttctactaagtgtagatttttttnnnnnnnnnnaagcttggcgtggatccgatatcaactagatcttgagacaaatggcagtattcatccacaattttaaaagaaaaggggggattggggggtacagtgcaggggaaagaatagtagacataatagcaacagacatacaaactaaag

SEQ ID NO: 18352 - DNA, 301 bp, Artificial Sequence
  Nf2.2_NTC.18
  crRNA array
  misc_feature (148)..(157): n is a, c, g, or t
cttggctttatatatcttgtggaaaggacgaaacaccgtaatttctactaagtgtagattgaggcgacggaaagctgactaatttctactaagtgtagattccggttacgaccggcaaaataatttctactaagtgtagatttttttnnnnnnnnnnaagcttggcgtggatccgatatcaactagatcttgagacaaatggcagtattcatccacaattttaaaagaaaaggggggattggggggtacagtgcaggggaaagaatagtagacataatagcaacagacatacaaactaaag

SEQ ID NO: 18353 - DNA, 301 bp, Artificial Sequence
  Nf2.2_NTC.19
  crRNA array
  misc_feature (148)..(157): n is a, c, g, or t
cttggctttatatatcttgtggaaaggacgaaacaccgtaatttctactaagtgtagattgaggcgacggaaagctgactaatttctactaagtgtagatcgtcgtagaacgatacccgataatttctactaagtgtagatttttttnnnnnnnnnnaagcttggcgtggatccgatatcaactagatcttgagacaaatggcagtattcatccacaattttaaaagaaaaggggggattggggggtacagtgcaggggaaagaatagtagacataatagcaacagacatacaaactaaag

SEQ ID NO: 18354 - DNA, 301 bp, Artificial Sequence
  Nf2.2_NTC.2
  crRNA array
  misc_feature (148)..(157): n is a, c, g, or t
cttggctttatatatcttgtggaaaggacgaaacaccgtaatttctactaagtgtagattgaggcgacggaaagctgactaatttctactaagtgtagatttatgtcgcgccgcgacccgtaatttctactaagtgtagatttttttnnnnnnnnnnaagcttggcgtggatccgatatcaactagatcttgagacaaatggcagtattcatccacaattttaaaagaaaaggggggattggggggtacagtgcaggggaaagaatagtagacataatagcaacagacatacaaactaaag

SEQ ID NO: 18355 - DNA, 301 bp, Artificial Sequence
  Nf2.2_NTC.20
  crRNA array
  misc_feature (148)..(157): n is a, c, g, or t
cttggctttatatatcttgtggaaaggacgaaacaccgtaatttctactaagtgtagattgaggcgacggaaagctgactaatttctactaagtgtagatattccggcgcgaccagaagataatttctactaagtgtagatttttttnnnnnnnnnnaagcttggcgtggatccgatatcaactagatcttgagacaaatggcagtattcatccacaattttaaaagaaaaggggggattggggggtacagtgcaggggaaagaatagtagacataatagcaacagacatacaaactaaag

SEQ ID NO: 18356 - DNA, 301 bp, Artificial Sequence
  Nf2.2_NTC.21
  crRNA array
  misc_feature (148)..(157): n is a, c, g, or t
cttggctttatatatcttgtggaaaggacgaaacaccgtaatttctactaagtgtagattgaggcgacggaaagctgactaatttctactaagtgtagatgtataacttcgcgcggtccgtaatttctactaagtgtagatttttttnnnnnnnnnnaagcttggcgtggatccgatatcaactagatcttgagacaaatggcagtattcatccacaattttaaaagaaaaggggggattggggggtacagtgcaggggaaagaatagtagacataatagcaacagacatacaaactaaag

SEQ ID NO: 18357 - DNA, 301 bp, Artificial Sequence
  Nf2.2_NTC.22
  crRNA array
  misc_feature (148)..(157): n is a, c, g, or t
cttggctttatatatcttgtggaaaggacgaaacaccgtaatttctactaagtgtagattgaggcgacggaaagctgactaatttctactaagtgtagatgcgcgtcaacgtaatgtgcctaatttctactaagtgtagatttttttnnnnnnnnnnaagcttggcgtggatccgatatcaactagatcttgagacaaatggcagtattcatccacaattttaaaagaaaaggggggattggggggtacagtgcaggggaaagaatagtagacataatagcaacagacatacaaactaaag

SEQ ID NO: 18358 - DNA, 301 bp, Artificial Sequence
  Nf2.2_NTC.23
  crRNA array
  misc_feature (148)..(157): n is a, c, g, or t
cttggctttatatatcttgtggaaaggacgaaacaccgtaatttctactaagtgtagattgaggcgacggaaagctgactaatttctactaagtgtagatacgcgctattatcgtaggtgtaatttctactaagtgtagatttttttnnnnnnnnnnaagcttggcgtggatccgatatcaactagatcttgagacaaatggcagtattcatccacaattttaaaagaaaaggggggattggggggtacagtgcaggggaaagaatagtagacataatagcaacagacatacaaactaaag

SEQ ID NO: 18359 - DNA, 301 bp, Artificial Sequence
  Nf2.2_NTC.24
  crRNA array
  misc_feature (148)..(157): n is a, c, g, or t
cttggctttatatatcttgtggaaaggacgaaacaccgtaatttctactaagtgtagattgaggcgacggaaagctgactaatttctactaagtgtagatactatcgacgttcgtcccggtaatttctactaagtgtagatttttttnnnnnnnnnnaagcttggcgtggatccgatatcaactagatcttgagacaaatggcagtattcatccacaattttaaaagaaaaggggggattggggggtacagtgcaggggaaagaatagtagacataatagcaacagacatacaaactaaag

SEQ ID NO: 18360 - DNA, 301 bp, Artificial Sequence
  Nf2.2_NTC.25
  crRNA array
  misc_feature (148)..(157): n is a, c, g, or t
cttggctttatatatcttgtggaaaggacgaaacaccgtaatttctactaagtgtagattgaggcgacggaaagctgactaatttctactaagtgtagattcgcgttatcgtgccgtgcgtaatttctactaagtgtagatttttttnnnnnnnnnnaagcttggcgtggatccgatatcaactagatcttgagacaaatggcagtattcatccacaattttaaaagaaaaggggggattggggggtacagtgcaggggaaagaatagtagacataatagcaacagacatacaaactaaag

SEQ ID NO: 18361 - DNA, 301 bp, Artificial Sequence
  Nf2.2_NTC.26
  crRNA array
  misc_feature (148)..(157): n is a, c, g, or t
cttggctttatatatcttgtggaaaggacgaaacaccgtaatttctactaagtgtagattgaggcgacggaaagctgactaatttctactaagtgtagatcgcgacggcggttttaacactaatttctactaagtgtagatttttttnnnnnnnnnnaagcttggcgtggatccgatatcaactagatcttgagacaaatggcagtattcatccacaattttaaaagaaaaggggggattggggggtacagtgcaggggaaagaatagtagacataatagcaacagacatacaaactaaag

SEQ ID NO: 18362 - DNA, 301 bp, Artificial Sequence
  Nf2.2_NTC.27
  crRNA array
  misc_feature (148)..(157): n is a, c, g, or t
cttggctttatatatcttgtggaaaggacgaaacaccgtaatttctactaagtgtagattgaggcgacggaaagctgactaatttctactaagtgtagatgtcgcgttgcgaccggcgcttaatttctactaagtgtagatttttttnnnnnnnnnnaagcttggcgtggatccgatatcaactagatcttgagacaaatggcagtattcatccacaattttaaaagaaaaggggggattggggggtacagtgcaggggaaagaatagtagacataatagcaacagacatacaaactaaag

SEQ ID NO: 18363 - DNA, 301 bp, Artificial Sequence
  Nf2.2_NTC.28
  crRNA array
  misc_feature (148)..(157): n is a, c, g, or t
cttggctttatatatcttgtggaaaggacgaaacaccgtaatttctactaagtgtagattgaggcgacggaaagctgactaatttctactaagtgtagataccgctaatcggcgtaaacttaatttctactaagtgtagatttttttnnnnnnnnnnaagcttggcgtggatccgatatcaactagatcttgagacaaatggcagtattcatccacaattttaaaagaaaaggggggattggggggtacagtgcaggggaaagaatagtagacataatagcaacagacatacaaactaaag

SEQ ID NO: 18364 - DNA, 301 bp, Artificial Sequence
  Nf2.2_NTC.29
  crRNA array
  misc_feature (148)..(157): n is a, c, g, or t
cttggctttatatatcttgtggaaaggacgaaacaccgtaatttctactaagtgtagattgaggcgacggaaagctgactaatttctactaagtgtagatcgcgatctataccgtctatataatttctactaagtgtagatttttttnnnnnnnnnnaagcttggcgtggatccgatatcaactagatcttgagacaaatggcagtattcatccacaattttaaaagaaaaggggggattggggggtacagtgcaggggaaagaatagtagacataatagcaacagacatacaaactaaag

SEQ ID NO: 18365 - DNA, 301 bp, Artificial Sequence
  Nf2.2_NTC.3
  crRNA array
  misc_feature (148)..(157): n is a, c, g, or t
cttggctttatatatcttgtggaaaggacgaaacaccgtaatttctactaagtgtagattgaggcgacggaaagctgactaatttctactaagtgtagattcgacgcgagacgacgtacataatttctactaagtgtagatttttttnnnnnnnnnnaagcttggcgtggatccgatatcaactagatcttgagacaaatggcagtattcatccacaattttaaaagaaaaggggggattggggggtacagtgcaggggaaagaatagtagacataatagcaacagacatacaaactaaag

SEQ ID NO: 18366 - DNA, 301 bp, Artificial Sequence
  Nf2.2_NTC.30
  crRNA array
  misc_feature (148)..(157): n is a, c, g, or t
cttggctttatatatcttgtggaaaggacgaaacaccgtaatttctactaagtgtagattgaggcgacggaaagctgactaatttctactaagtgtagatcgatcgtacgggtgtcctaataatttctactaagtgtagatttttttnnnnnnnnnnaagcttggcgtggatccgatatcaactagatcttgagacaaatggcagtattcatccacaattttaaaagaaaaggggggattggggggtacagtgcaggggaaagaatagtagacataatagcaacagacatacaaactaaag

SEQ ID NO: 18367 - DNA, 301 bp, Artificial Sequence
  Nf2.2_NTC.31
  crRNA array
  misc_feature (148)..(157): n is a, c, g, or t
cttggctttatatatcttgtggaaaggacgaaacaccgtaatttctactaagtgtagattgaggcgacggaaagctgactaatttctactaagtgtagatgccgaccgcgtgattgtaggtaatttctactaagtgtagatttttttnnnnnnnnnnaagcttggcgtggatccgatatcaactagatcttgagacaaatggcagtattcatccacaattttaaaagaaaaggggggattggggggtacagtgcaggggaaagaatagtagacataatagcaacagacatacaaactaaag

SEQ ID NO: 18368 - DNA, 301 bp, Artificial Sequence
  Nf2.2_NTC.32
  crRNA array
  misc_feature (148)..(157): n is a, c, g, or t
cttggctttatatatcttgtggaaaggacgaaacaccgtaatttctactaagtgtagattgaggcgacggaaagctgactaatttctactaagtgtagatgcacgttacgcccgggtcactaatttctactaagtgtagatttttttnnnnnnnnnnaagcttggcgtggatccgatatcaactagatcttgagacaaatggcagtattcatccacaattttaaaagaaaaggggggattggggggtacagtgcaggggaaagaatagtagacataatagcaacagacatacaaactaaag

SEQ ID NO: 18369 - DNA, 301 bp, Artificial Sequence
  Nf2.2_NTC.33
  crRNA array
  misc_feature (148)..(157): n is a, c, g, or t
cttggctttatatatcttgtggaaaggacgaaacaccgtaatttctactaagtgtagattgaggcgacggaaagctgactaatttctactaagtgtagattaagcgaccgacgcattcgctaatttctactaagtgtagatttttttnnnnnnnnnnaagcttggcgtggatccgatatcaactagatcttgagacaaatggcagtattcatccacaattttaaaagaaaaggggggattggggggtacagtgcaggggaaagaatagtagacataatagcaacagacatacaaactaaag

SEQ ID NO: 18370 - DNA, 301 bp, Artificial Sequence
  Nf2.2_NTC.34
  crRNA array
  misc_feature (148)..(157): n is a, c, g, or t
cttggctttatatatcttgtggaaaggacgaaacaccgtaatttctactaagtgtagattgaggcgacggaaagctgactaatttctactaagtgtagattagcgttcgacacgtgaaactaatttctactaagtgtagatttttttnnnnnnnnnnaagcttggcgtggatccgatatcaactagatcttgagacaaatggcagtattcatccacaattttaaaagaaaaggggggattggggggtacagtgcaggggaaagaatagtagacataatagcaacagacatacaaactaaag

SEQ ID NO: 18371 - DNA, 301 bp, Artificial Sequence
  Nf2.2_NTC.35
  crRNA array
  misc_feature (148)..(157): n is a, c, g, or t
cttggctttatatatcttgtggaaaggacgaaacaccgtaatttctactaagtgtagattgaggcgacggaaagctgactaatttctactaagtgtagattggcgcgtaatcgctattcgtaatttctactaagtgtagatttttttnnnnnnnnnnaagcttggcgtggatccgatatcaactagatcttgagacaaatggcagtattcatccacaattttaaaagaaaaggggggattggggggtacagtgcaggggaaagaatagtagacataatagcaacagacatacaaactaaag

SEQ ID NO: 18372 - DNA, 301 bp, Artificial Sequence
  Nf2.2_NTC.36
  crRNA array
  misc_feature (148)..(157): n is a, c, g, or t
cttggctttatatatcttgtggaaaggacgaaacaccgtaatttctactaagtgtagattgaggcgacggaaagctgactaatttctactaagtgtagatcaacccgccgtagcgggccttaatttctactaagtgtagatttttttnnnnnnnnnnaagcttggcgtggatccgatatcaactagatcttgagacaaatggcagtattcatccacaattttaaaagaaaaggggggattggggggtacagtgcaggggaaagaatagtagacataatagcaacagacatacaaactaaag

SEQ ID NO: 18373 - DNA, 301 bp, Artificial Sequence
  Nf2.2_NTC.37
  crRNA array
  misc_feature (148)..(157): n is a, c, g, or t
cttggctttatatatcttgtggaaaggacgaaacaccgtaatttctactaagtgtagattgaggcgacggaaagctgactaatttctactaagtgtagattttgcgttgacgcgattacttaatttctactaagtgtagatttttttnnnnnnnnnnaagcttggcgtggatccgatatcaactagatcttgagacaaatggcagtattcatccacaattttaaaagaaaaggggggattggggggtacagtgcaggggaaagaatagtagacataatagcaacagacatacaaactaaag

SEQ ID NO: 18374 - DNA, 301 bp, Artificial Sequence
  Nf2.2_NTC.38
  crRNA array
  misc_feature (148)..(157): n is a, c, g, or t
cttggctttatatatcttgtggaaaggacgaaacaccgtaatttctactaagtgtagattgaggcgacggaaagctgactaatttctactaagtgtagataacggagcgcgatactaccataatttctactaagtgtagatttttttnnnnnnnnnnaagcttggcgtggatccgatatcaactagatcttgagacaaatggcagtattcatccacaattttaaaagaaaaggggggattggggggtacagtgcaggggaaagaatagtagacataatagcaacagacatacaaactaaag

SEQ ID NO: 18375 - DNA, 301 bp, Artificial Sequence
  Nf2.2_NTC.39
  crRNA array
  misc_feature (148)..(157): n is a, c, g, or t
cttggctttatatatcttgtggaaaggacgaaacaccgtaatttctactaagtgtagattgaggcgacggaaagctgactaatttctactaagtgtagatccggacgttataacgtttcttaatttctactaagtgtagatttttttnnnnnnnnnnaagcttggcgtggatccgatatcaactagatcttgagacaaatggcagtattcatccacaattttaaaagaaaaggggggattggggggtacagtgcaggggaaagaatagtagacataatagcaacagacatacaaactaaag

SEQ ID NO: 18376 - DNA, 301 bp, Artificial Sequence
  Nf2.2_NTC.4
  crRNA array
  misc_feature (148)..(157): n is a, c, g, or t
cttggctttatatatcttgtggaaaggacgaaacaccgtaatttctactaagtgtagattgaggcgacggaaagctgactaatttctactaagtgtagatatacccgtcgcgaacgtgagtaatttctactaagtgtagatttttttnnnnnnnnnnaagcttggcgtggatccgatatcaactagatcttgagacaaatggcagtattcatccacaattttaaaagaaaaggggggattggggggtacagtgcaggggaaagaatagtagacataatagcaacagacatacaaactaaag

SEQ ID NO: 18377 - DNA, 301 bp, Artificial Sequence
  Nf2.2_NTC.40
  crRNA array
  misc_feature (148)..(157): n is a, c, g, or t
cttggctttatatatcttgtggaaaggacgaaacaccgtaatttctactaagtgtagattgaggcgacggaaagctgactaatttctactaagtgtagatattcgcgaacccggccggaataatttctactaagtgtagatttttttnnnnnnnnnnaagcttggcgtggatccgatatcaactagatcttgagacaaatggcagtattcatccacaattttaaaagaaaaggggggattggggggtacagtgcaggggaaagaatagtagacataatagcaacagacatacaaactaaag

SEQ ID NO: 18378 - DNA, 301 bp, Artificial Sequence
  Nf2.2_NTC.41
  crRNA array
  misc_feature (148)..(157): n is a, c, g, or t
cttggctttatatatcttgtggaaaggacgaaacaccgtaatttctactaagtgtagattgaggcgacggaaagctgactaatttctactaagtgtagatttgatggcgcgacgcgttattaatttctactaagtgtagatttttttnnnnnnnnnnaagcttggcgtggatccgatatcaactagatcttgagacaaatggcagtattcatccacaattttaaaagaaaaggggggattggggggtacagtgcaggggaaagaatagtagacataatagcaacagacatacaaactaaag

SEQ ID NO: 18379 - DNA, 301 bp, Artificial Sequence
  Nf2.2_NTC.42
  crRNA array
  misc_feature (148)..(157): n is a, c, g, or t
cttggctttatatatcttgtggaaaggacgaaacaccgtaatttctactaagtgtagattgaggcgacggaaagctgactaatttctactaagtgtagatggtcaaatcgcggcgataactaatttctactaagtgtagatttttttnnnnnnnnnnaagcttggcgtggatccgatatcaactagatcttgagacaaatggcagtattcatccacaattttaaaagaaaaggggggattggggggtacagtgcaggggaaagaatagtagacataatagcaacagacatacaaactaaag

SEQ ID NO: 18380 - DNA, 301 bp, Artificial Sequence
  Nf2.2_NTC.43
  crRNA array
  misc_feature (148)..(157): n is a, c, g, or t
cttggctttatatatcttgtggaaaggacgaaacaccgtaatttctactaagtgtagattgaggcgacggaaagctgactaatttctactaagtgtagatcgactcgcgcattgaactggtaatttctactaagtgtagatttttttnnnnnnnnnnaagcttggcgtggatccgatatcaactagatcttgagacaaatggcagtattcatccacaattttaaaagaaaaggggggattggggggtacagtgcaggggaaagaatagtagacataatagcaacagacatacaaactaaag

SEQ ID NO: 18381 - DNA, 301 bp, Artificial Sequence
  Nf2.2_NTC.44
  crRNA array
  misc_feature (148)..(157): n is a, c, g, or t
cttggctttatatatcttgtggaaaggacgaaacaccgtaatttctactaagtgtagattgaggcgacggaaagctgactaatttctactaagtgtagatagcgtcgtacgatttatcgttaatttctactaagtgtagatttttttnnnnnnnnnnaagcttggcgtggatccgatatcaactagatcttgagacaaatggcagtattcatccacaattttaaaagaaaaggggggattggggggtacagtgcaggggaaagaatagtagacataatagcaacagacatacaaactaaag

SEQ ID NO: 18382 - DNA, 301 bp, Artificial Sequence
  Nf2.2_NTC.45
  crRNA array
  misc_feature (148)..(157): n is a, c, g, or t
cttggctttatatatcttgtggaaaggacgaaacaccgtaatttctactaagtgtagattgaggcgacggaaagctgactaatttctactaagtgtagatcggaacgcgtgatactagggtaatttctactaagtgtagatttttttnnnnnnnnnnaagcttggcgtggatccgatatcaactagatcttgagacaaatggcagtattcatccacaattttaaaagaaaaggggggattggggggtacagtgcaggggaaagaatagtagacataatagcaacagacatacaaactaaag

SEQ ID NO: 18383 - DNA, 301 bp, Artificial Sequence
  Nf2.2_NTC.46
  crRNA array
  misc_feature (148)..(157): n is a, c, g, or t
cttggctttatatatcttgtggaaaggacgaaacaccgtaatttctactaagtgtagattgaggcgacggaaagctgactaatttctactaagtgtagatagcgggtcgtagacgcgcggtaatttctactaagtgtagatttttttnnnnnnnnnnaagcttggcgtggatccgatatcaactagatcttgagacaaatggcagtattcatccacaattttaaaagaaaaggggggattggggggtacagtgcaggggaaagaatagtagacataatagcaacagacatacaaactaaag

SEQ ID NO: 18384 - DNA, 301 bp, Artificial Sequence
  Nf2.2_NTC.47
  crRNA array
  misc_feature (148)..(157): n is a, c, g, or t
cttggctttatatatcttgtggaaaggacgaaacaccgtaatttctactaagtgtagattgaggcgacggaaagctgactaatttctactaagtgtagattctcgtatcgcgattgttaataatttctactaagtgtagatttttttnnnnnnnnnnaagcttggcgtggatccgatatcaactagatcttgagacaaatggcagtattcatccacaattttaaaagaaaaggggggattggggggtacagtgcaggggaaagaatagtagacataatagcaacagacatacaaactaaag

SEQ ID NO: 18385 - DNA, 301 bp, Artificial Sequence
  Nf2.2_NTC.48
  crRNA array
  misc_feature (148)..(157): n is a, c, g, or t
cttggctttatatatcttgtggaaaggacgaaacaccgtaatttctactaagtgtagattgaggcgacggaaagctgactaatttctactaagtgtagatcggtcgactacggctgttagtaatttctactaagtgtagatttttttnnnnnnnnnnaagcttggcgtggatccgatatcaactagatcttgagacaaatggcagtattcatccacaattttaaaagaaaaggggggattggggggtacagtgcaggggaaagaatagtagacataatagcaacagacatacaaactaaag

SEQ ID NO: 18386 - DNA, 301 bp, Artificial Sequence
  Nf2.2_NTC.49
  crRNA array
  misc_feature (148)..(157): n is a, c, g, or t
cttggctttatatatcttgtggaaaggacgaaacaccgtaatttctactaagtgtagattgaggcgacggaaagctgactaatttctactaagtgtagattcggggcgcgtcaactgaattaatttctactaagtgtagatttttttnnnnnnnnnnaagcttggcgtggatccgatatcaactagatcttgagacaaatggcagtattcatccacaattttaaaagaaaaggggggattggggggtacagtgcaggggaaagaatagtagacataatagcaacagacatacaaactaaag

SEQ ID NO: 18387 - DNA, 301 bp, Artificial Sequence
  Nf2.2_NTC.5
  crRNA array
  misc_feature (148)..(157): n is a, c, g, or t
cttggctttatatatcttgtggaaaggacgaaacaccgtaatttctactaagtgtagattgaggcgacggaaagctgactaatttctactaagtgtagatgcttacgcgtcgcgaatgtataatttctactaagtgtagatttttttnnnnnnnnnnaagcttggcgtggatccgatatcaactagatcttgagacaaatggcagtattcatccacaattttaaaagaaaaggggggattggggggtacagtgcaggggaaagaatagtagacataatagcaacagacatacaaactaaag

SEQ ID NO: 18388 - DNA, 301 bp, Artificial Sequence
  Nf2.2_NTC.50
  crRNA array
  misc_feature (148)..(157): n is a, c, g, or t
cttggctttatatatcttgtggaaaggacgaaacaccgtaatttctactaagtgtagattgaggcgacggaaagctgactaatttctactaagtgtagatattgccgctcgcgcaaaatctaatttctactaagtgtagatttttttnnnnnnnnnnaagcttggcgtggatccgatatcaactagatcttgagacaaatggcagtattcatccacaattttaaaagaaaaggggggattggggggtacagtgcaggggaaagaatagtagacataatagcaacagacatacaaactaaag

SEQ ID NO: 18389 - DNA, 301 bp, Artificial Sequence
  Nf2.2_NTC.51
  crRNA array
  misc_feature (148)..(157): n is a, c, g, or t
cttggctttatatatcttgtggaaaggacgaaacaccgtaatttctactaagtgtagattgaggcgacggaaagctgactaatttctactaagtgtagattaacgcgcaacacgccaatgtaatttctactaagtgtagatttttttnnnnnnnnnnaagcttggcgtggatccgatatcaactagatcttgagacaaatggcagtattcatccacaattttaaaagaaaaggggggattggggggtacagtgcaggggaaagaatagtagacataatagcaacagacatacaaactaaag

SEQ ID NO: 18390 - DNA, 301 bp, Artificial Sequence
  Nf2.2_NTC.6
  crRNA array
  misc_feature (148)..(157): n is a, c, g, or t
cttggctttatatatcttgtggaaaggacgaaacaccgtaatttctactaagtgtagattgaggcgacggaaagctgactaatttctactaagtgtagatcgaatcgcgcctacgggaattaatttctactaagtgtagatttttttnnnnnnnnnnaagcttggcgtggatccgatatcaactagatcttgagacaaatggcagtattcatccacaattttaaaagaaaaggggggattggggggtacagtgcaggggaaagaatagtagacataatagcaacagacatacaaactaaag

SEQ ID NO: 18391 - DNA, 301 bp, Artificial Sequence
  Nf2.2_NTC.7
  crRNA array
  misc_feature (148)..(157): n is a, c, g, or t
cttggctttatatatcttgtggaaaggacgaaacaccgtaatttctactaagtgtagattgaggcgacggaaagctgactaatttctactaagtgtagatcgccgaacggataagactattaatttctactaagtgtagatttttttnnnnnnnnnnaagcttggcgtggatccgatatcaactagatcttgagacaaatggcagtattcatccacaattttaaaagaaaaggggggattggggggtacagtgcaggggaaagaatagtagacataatagcaacagacatacaaactaaag

SEQ ID NO: 18392 - DNA, 301 bp, Artificial Sequence
  Nf2.2_NTC.8
  crRNA array
  misc_feature (148)..(157): n is a, c, g, or t
cttggctttatatatcttgtggaaaggacgaaacaccgtaatttctactaagtgtagattgaggcgacggaaagctgactaatttctactaagtgtagatcgaccgaggttacgctgggataatttctactaagtgtagatttttttnnnnnnnnnnaagcttggcgtggatccgatatcaactagatcttgagacaaatggcagtattcatccacaattttaaaagaaaaggggggattggggggtacagtgcaggggaaagaatagtagacataatagcaacagacatacaaactaaag

SEQ ID NO: 18393 - DNA, 301 bp, Artificial Sequence
  Nf2.2_NTC.9
  crRNA array
  misc_feature (148)..(157): n is a, c, g, or t
cttggctttatatatcttgtggaaaggacgaaacaccgtaatttctactaagtgtagattgaggcgacggaaagctgactaatttctactaagtgtagatatcgccgtacggctatggcataatttctactaagtgtagatttttttnnnnnnnnnnaagcttggcgtggatccgatatcaactagatcttgagacaaatggcagtattcatccacaattttaaaagaaaaggggggattggggggtacagtgcaggggaaagaatagtagacataatagcaacagacatacaaactaaag

SEQ ID NO: 18394 - DNA, 301 bp, Artificial Sequence
  Nf2.3_NTC.0
  crRNA array
  misc_feature (148)..(157): n is a, c, g, or t
cttggctttatatatcttgtggaaaggacgaaacaccgtaatttctactaagtgtagatcgtcgcctcataaataggtctaatttctactaagtgtagattatagcgtcgcgcgctaatttaatttctactaagtgtagatttttttnnnnnnnnnnaagcttggcgtggatccgatatcaactagatcttgagacaaatggcagtattcatccacaattttaaaagaaaaggggggattggggggtacagtgcaggggaaagaatagtagacataatagcaacagacatacaaactaaag

SEQ ID NO: 18395 - DNA, 301 bp, Artificial Sequence
  Nf2.3_NTC.1
  crRNA array
  misc_feature (148)..(157): n is a, c, g, or t
cttggctttatatatcttgtggaaaggacgaaacaccgtaatttctactaagtgtagatcgtcgcctcataaataggtctaatttctactaagtgtagatcgcgtaaccgttccggctcctaatttctactaagtgtagatttttttnnnnnnnnnnaagcttggcgtggatccgatatcaactagatcttgagacaaatggcagtattcatccacaattttaaaagaaaaggggggattggggggtacagtgcaggggaaagaatagtagacataatagcaacagacatacaaactaaag

SEQ ID NO: 18396 - DNA, 301 bp, Artificial Sequence
  Nf2.3_NTC.10
  crRNA array
  misc_feature (148)..(157): n is a, c, g, or t
cttggctttatatatcttgtggaaaggacgaaacaccgtaatttctactaagtgtagatcgtcgcctcataaataggtctaatttctactaagtgtagatcgctaagttcgcgcgggccgtaatttctactaagtgtagatttttttnnnnnnnnnnaagcttggcgtggatccgatatcaactagatcttgagacaaatggcagtattcatccacaattttaaaagaaaaggggggattggggggtacagtgcaggggaaagaatagtagacataatagcaacagacatacaaactaaag

SEQ ID NO: 18397 - DNA, 301 bp, Artificial Sequence
  Nf2.3_NTC.11
  crRNA array
  misc_feature (148)..(157): n is a, c, g, or t
cttggctttatatatcttgtggaaaggacgaaacaccgtaatttctactaagtgtagatcgtcgcctcataaataggtctaatttctactaagtgtagatcgttcgtcgacgaagcaatctaatttctactaagtgtagatttttttnnnnnnnnnnaagcttggcgtggatccgatatcaactagatcttgagacaaatggcagtattcatccacaattttaaaagaaaaggggggattggggggtacagtgcaggggaaagaatagtagacataatagcaacagacatacaaactaaag

SEQ ID NO: 18398 - DNA, 301 bp, Artificial Sequence
  Nf2.3_NTC.12
  crRNA array
  misc_feature (148)..(157): n is a, c, g, or t
cttggctttatatatcttgtggaaaggacgaaacaccgtaatttctactaagtgtagatcgtcgcctcataaataggtctaatttctactaagtgtagatcgccgacgattaatcaatagtaatttctactaagtgtagatttttttnnnnnnnnnnaagcttggcgtggatccgatatcaactagatcttgagacaaatggcagtattcatccacaattttaaaagaaaaggggggattggggggtacagtgcaggggaaagaatagtagacataatagcaacagacatacaaactaaag

SEQ ID NO: 18399 - DNA, 301 bp, Artificial Sequence
  Nf2.3_NTC.13
  crRNA array
  misc_feature (148)..(157): n is a, c, g, or t
cttggctttatatatcttgtggaaaggacgaaacaccgtaatttctactaagtgtagatcgtcgcctcataaataggtctaatttctactaagtgtagatgaccgttgtatcgcgatcaataatttctactaagtgtagatttttttnnnnnnnnnnaagcttggcgtggatccgatatcaactagatcttgagacaaatggcagtattcatccacaattttaaaagaaaaggggggattggggggtacagtgcaggggaaagaatagtagacataatagcaacagacatacaaactaaag

SEQ ID NO: 18400 - DNA, 301 bp, Artificial Sequence
  Nf2.3_NTC.14
  crRNA array
  misc_feature (148)..(157): n is a, c, g, or t
cttggctttatatatcttgtggaaaggacgaaacaccgtaatttctactaagtgtagatcgtcgcctcataaataggtctaatttctactaagtgtagatccgttcgtgcgatagtgttttaatttctactaagtgtagatttttttnnnnnnnnnnaagcttggcgtggatccgatatcaactagatcttgagacaaatggcagtattcatccacaattttaaaagaaaaggggggattggggggtacagtgcaggggaaagaatagtagacataatagcaacagacatacaaactaaag

SEQ ID NO: 18401 - DNA, 301 bp, Artificial Sequence
  Nf2.3_NTC.15
  crRNA array
  misc_feature (148)..(157): n is a, c, g, or t
cttggctttatatatcttgtggaaaggacgaaacaccgtaatttctactaagtgtagatcgtcgcctcataaataggtctaatttctactaagtgtagatgttgtcgtgccgcgaatttataatttctactaagtgtagatttttttnnnnnnnnnnaagcttggcgtggatccgatatcaactagatcttgagacaaatggcagtattcatccacaattttaaaagaaaaggggggattggggggtacagtgcaggggaaagaatagtagacataatagcaacagacatacaaactaaag

SEQ ID NO: 18402 - DNA, 301 bp, Artificial Sequence
  Nf2.3_NTC.16
  crRNA array
  misc_feature (148)..(157): n is a, c, g, or t
cttggctttatatatcttgtggaaaggacgaaacaccgtaatttctactaagtgtagatcgtcgcctcataaataggtctaatttctactaagtgtagatcggtacgttagacgaaaatttaatttctactaagtgtagatttttttnnnnnnnnnnaagcttggcgtggatccgatatcaactagatcttgagacaaatggcagtattcatccacaattttaaaagaaaaggggggattggggggtacagtgcaggggaaagaatagtagacataatagcaacagacatacaaactaaag

SEQ ID NO: 18403 - DNA, 301 bp, Artificial Sequence
  Nf2.3_NTC.17
  crRNA array
  misc_feature (148)..(157): n is a, c, g, or t
cttggctttatatatcttgtggaaaggacgaaacaccgtaatttctactaagtgtagatcgtcgcctcataaataggtctaatttctactaagtgtagattatcgaacgctatcgaacgttaatttctactaagtgtagatttttttnnnnnnnnnnaagcttggcgtggatccgatatcaactagatcttgagacaaatggcagtattcatccacaattttaaaagaaaaggggggattggggggtacagtgcaggggaaagaatagtagacataatagcaacagacatacaaactaaag

SEQ ID NO: 18404 - DNA, 301 bp, Artificial Sequence
  Nf2.3_NTC.18
  crRNA array
  misc_feature (148)..(157): n is a, c, g, or t
cttggctttatatatcttgtggaaaggacgaaacaccgtaatttctactaagtgtagatcgtcgcctcataaataggtctaatttctactaagtgtagattccggttacgaccggcaaaataatttctactaagtgtagatttttttnnnnnnnnnnaagcttggcgtggatccgatatcaactagatcttgagacaaatggcagtattcatccacaattttaaaagaaaaggggggattggggggtacagtgcaggggaaagaatagtagacataatagcaacagacatacaaactaaag

SEQ ID NO: 18405 - DNA, 301 bp, Artificial Sequence
  Nf2.3_NTC.19
  crRNA array
  misc_feature (148)..(157): n is a, c, g, or t
cttggctttatatatcttgtggaaaggacgaaacaccgtaatttctactaagtgtagatcgtcgcctcataaataggtctaatttctactaagtgtagatcgtcgtagaacgatacccgataatttctactaagtgtagatttttttnnnnnnnnnnaagcttggcgtggatccgatatcaactagatcttgagacaaatggcagtattcatccacaattttaaaagaaaaggggggattggggggtacagtgcaggggaaagaatagtagacataatagcaacagacatacaaactaaag

SEQ ID NO: 18406 - DNA, 301 bp, Artificial Sequence
  Nf2.3_NTC.2
  crRNA array
  misc_feature (148)..(157): n is a, c, g, or t
cttggctttatatatcttgtggaaaggacgaaacaccgtaatttctactaagtgtagatcgtcgcctcataaataggtctaatttctactaagtgtagatttatgtcgcgccgcgacccgtaatttctactaagtgtagatttttttnnnnnnnnnnaagcttggcgtggatccgatatcaactagatcttgagacaaatggcagtattcatccacaattttaaaagaaaaggggggattggggggtacagtgcaggggaaagaatagtagacataatagcaacagacatacaaactaaag

SEQ ID NO: 18407 - DNA, 301 bp, Artificial Sequence
  Nf2.3_NTC.20
  crRNA array
  misc_feature (148)..(157): n is a, c, g, or t
cttggctttatatatcttgtggaaaggacgaaacaccgtaatttctactaagtgtagatcgtcgcctcataaataggtctaatttctactaagtgtagatattccggcgcgaccagaagataatttctactaagtgtagatttttttnnnnnnnnnnaagcttggcgtggatccgatatcaactagatcttgagacaaatggcagtattcatccacaattttaaaagaaaaggggggattggggggtacagtgcaggggaaagaatagtagacataatagcaacagacatacaaactaaag

SEQ ID NO: 18408 - DNA, 301 bp, Artificial Sequence
  Nf2.3_NTC.21
  crRNA array
  misc_feature (148)..(157): n is a, c, g, or t
cttggctttatatatcttgtggaaaggacgaaacaccgtaatttctactaagtgtagatcgtcgcctcataaataggtctaatttctactaagtgtagatgtataacttcgcgcggtccgtaatttctactaagtgtagatttttttnnnnnnnnnnaagcttggcgtggatccgatatcaactagatcttgagacaaatggcagtattcatccacaattttaaaagaaaaggggggattggggggtacagtgcaggggaaagaatagtagacataatagcaacagacatacaaactaaag

SEQ ID NO: 18409 - DNA, 301 bp, Artificial Sequence
  Nf2.3_NTC.22
  crRNA array
  misc_feature (148)..(157): n is a, c, g, or t
cttggctttatatatcttgtggaaaggacgaaacaccgtaatttctactaagtgtagatcgtcgcctcataaataggtctaatttctactaagtgtagatgcgcgtcaacgtaatgtgcctaatttctactaagtgtagatttttttnnnnnnnnnnaagcttggcgtggatccgatatcaactagatcttgagacaaatggcagtattcatccacaattttaaaagaaaaggggggattggggggtacagtgcaggggaaagaatagtagacataatagcaacagacatacaaactaaag

SEQ ID NO: 18410 - DNA, 301 bp, Artificial Sequence
  Nf2.3_NTC.23
  crRNA array
  misc_feature (148)..(157): n is a, c, g, or t
cttggctttatatatcttgtggaaaggacgaaacaccgtaatttctactaagtgtagatcgtcgcctcataaataggtctaatttctactaagtgtagatacgcgctattatcgtaggtgtaatttctactaagtgtagatttttttnnnnnnnnnnaagcttggcgtggatccgatatcaactagatcttgagacaaatggcagtattcatccacaattttaaaagaaaaggggggattggggggtacagtgcaggggaaagaatagtagacataatagcaacagacatacaaactaaag

SEQ ID NO: 18411 - DNA, 301 bp, Artificial Sequence
  Nf2.3_NTC.24
  crRNA array
  misc_feature (148)..(157): n is a, c, g, or t
cttggctttatatatcttgtggaaaggacgaaacaccgtaatttctactaagtgtagatcgtcgcctcataaataggtctaatttctactaagtgtagatactatcgacgttcgtcccggtaatttctactaagtgtagatttttttnnnnnnnnnnaagcttggcgtggatccgatatcaactagatcttgagacaaatggcagtattcatccacaattttaaaagaaaaggggggattggggggtacagtgcaggggaaagaatagtagacataatagcaacagacatacaaactaaag

SEQ ID NO: 18412 - DNA, 301 bp, Artificial Sequence
  Nf2.3_NTC.25
  crRNA array
  misc_feature (148)..(157): n is a, c, g, or t
cttggctttatatatcttgtggaaaggacgaaacaccgtaatttctactaagtgtagatcgtcgcctcataaataggtctaatttctactaagtgtagattcgcgttatcgtgccgtgcgtaatttctactaagtgtagatttttttnnnnnnnnnnaagcttggcgtggatccgatatcaactagatcttgagacaaatggcagtattcatccacaattttaaaagaaaaggggggattggggggtacagtgcaggggaaagaatagtagacataatagcaacagacatacaaactaaag

SEQ ID NO: 18413 - DNA, 301 bp, Artificial Sequence
  Nf2.3_NTC.26
  crRNA array
  misc_feature (148)..(157): n is a, c, g, or t
cttggctttatatatcttgtggaaaggacgaaacaccgtaatttctactaagtgtagatcgtcgcctcataaataggtctaatttctactaagtgtagatcgcgacggcggttttaacactaatttctactaagtgtagatttttttnnnnnnnnnnaagcttggcgtggatccgatatcaactagatcttgagacaaatggcagtattcatccacaattttaaaagaaaaggggggattggggggtacagtgcaggggaaagaatagtagacataatagcaacagacatacaaactaaag

SEQ ID NO: 18414 - DNA, 301 bp, Artificial Sequence
  Nf2.3_NTC.27
  crRNA array
  misc_feature (148)..(157): n is a, c, g, or t
cttggctttatatatcttgtggaaaggacgaaacaccgtaatttctactaagtgtagatcgtcgcctcataaataggtctaatttctactaagtgtagatgtcgcgttgcgaccggcgcttaatttctactaagtgtagatttttttnnnnnnnnnnaagcttggcgtggatccgatatcaactagatcttgagacaaatggcagtattcatccacaattttaaaagaaaaggggggattggggggtacagtgcaggggaaagaatagtagacataatagcaacagacatacaaactaaag

SEQ ID NO: 18415 - DNA, 301 bp, Artificial Sequence
  Nf2.3_NTC.28
  crRNA array
  misc_feature (148)..(157): n is a, c, g, or t
cttggctttatatatcttgtggaaaggacgaaacaccgtaatttctactaagtgtagatcgtcgcctcataaataggtctaatttctactaagtgtagataccgctaatcggcgtaaacttaatttctactaagtgtagatttttttnnnnnnnnnnaagcttggcgtggatccgatatcaactagatcttgagacaaatggcagtattcatccacaattttaaaagaaaaggggggattggggggtacagtgcaggggaaagaatagtagacataatagcaacagacatacaaactaaag

SEQ ID NO: 18416 - DNA, 301 bp, Artificial Sequence
  Nf2.3_NTC.29
  crRNA array
  misc_feature (148)..(157): n is a, c, g, or t
cttggctttatatatcttgtggaaaggacgaaacaccgtaatttctactaagtgtagatcgtcgcctcataaataggtctaatttctactaagtgtagatcgcgatctataccgtctatataatttctactaagtgtagatttttttnnnnnnnnnnaagcttggcgtggatccgatatcaactagatcttgagacaaatggcagtattcatccacaattttaaaagaaaaggggggattggggggtacagtgcaggggaaagaatagtagacataatagcaacagacatacaaactaaag

SEQ ID NO: 18417 - DNA, 301 bp, Artificial Sequence
  Nf2.3_NTC.3
  crRNA array
  misc_feature (148)..(157): n is a, c, g, or t
cttggctttatatatcttgtggaaaggacgaaacaccgtaatttctactaagtgtagatcgtcgcctcataaataggtctaatttctactaagtgtagattcgacgcgagacgacgtacataatttctactaagtgtagatttttttnnnnnnnnnnaagcttggcgtggatccgatatcaactagatcttgagacaaatggcagtattcatccacaattttaaaagaaaaggggggattggggggtacagtgcaggggaaagaatagtagacataatagcaacagacatacaaactaaag

SEQ ID NO: 18418 - DNA, 301 bp, Artificial Sequence
  Nf2.3_NTC.30
  crRNA array
  misc_feature (148)..(157): n is a, c, g, or t
cttggctttatatatcttgtggaaaggacgaaacaccgtaatttctactaagtgtagatcgtcgcctcataaataggtctaatttctactaagtgtagatcgatcgtacgggtgtcctaataatttctactaagtgtagatttttttnnnnnnnnnnaagcttggcgtggatccgatatcaactagatcttgagacaaatggcagtattcatccacaattttaaaagaaaaggggggattggggggtacagtgcaggggaaagaatagtagacataatagcaacagacatacaaactaaag

SEQ ID NO: 18419 - DNA, 301 bp, Artificial Sequence
  Nf2.3_NTC.31
  crRNA array
  misc_feature (148)..(157): n is a, c, g, or t
cttggctttatatatcttgtggaaaggacgaaacaccgtaatttctactaagtgtagatcgtcgcctcataaataggtctaatttctactaagtgtagatgccgaccgcgtgattgtaggtaatttctactaagtgtagatttttttnnnnnnnnnnaagcttggcgtggatccgatatcaactagatcttgagacaaatggcagtattcatccacaattttaaaagaaaaggggggattggggggtacagtgcaggggaaagaatagtagacataatagcaacagacatacaaactaaag

SEQ ID NO: 18420 - DNA, 301 bp, Artificial Sequence
  Nf2.3_NTC.32
  crRNA array
  misc_feature (148)..(157): n is a, c, g, or t
cttggctttatatatcttgtggaaaggacgaaacaccgtaatttctactaagtgtagatcgtcgcctcataaataggtctaatttctactaagtgtagatgcacgttacgcccgggtcactaatttctactaagtgtagatttttttnnnnnnnnnnaagcttggcgtggatccgatatcaactagatcttgagacaaatggcagtattcatccacaattttaaaagaaaaggggggattggggggtacagtgcaggggaaagaatagtagacataatagcaacagacatacaaactaaag

SEQ ID NO: 18421 - DNA, 301 bp, Artificial Sequence
  Nf2.3_NTC.33
  crRNA array
  misc_feature (148)..(157): n is a, c, g, or t
cttggctttatatatcttgtggaaaggacgaaacaccgtaatttctactaagtgtagatcgtcgcctcataaataggtctaatttctactaagtgtagattaagcgaccgacgcattcgctaatttctactaagtgtagatttttttnnnnnnnnnnaagcttggcgtggatccgatatcaactagatcttgagacaaatggcagtattcatccacaattttaaaagaaaaggggggattggggggtacagtgcaggggaaagaatagtagacataatagcaacagacatacaaactaaag

SEQ ID NO: 18422 - DNA, 301 bp, Artificial Sequence
  Nf2.3_NTC.34
  crRNA array
  misc_feature (148)..(157): n is a, c, g, or t
cttggctttatatatcttgtggaaaggacgaaacaccgtaatttctactaagtgtagatcgtcgcctcataaataggtctaatttctactaagtgtagattagcgttcgacacgtgaaactaatttctactaagtgtagatttttttnnnnnnnnnnaagcttggcgtggatccgatatcaactagatcttgagacaaatggcagtattcatccacaattttaaaagaaaaggggggattggggggtacagtgcaggggaaagaatagtagacataatagcaacagacatacaaactaaag

SEQ ID NO: 18423 - DNA, 301 bp, Artificial Sequence
  Nf2.3_NTC.35
  crRNA array
  misc_feature (148)..(157): n is a, c, g, or t
cttggctttatatatcttgtggaaaggacgaaacaccgtaatttctactaagtgtagatcgtcgcctcataaataggtctaatttctactaagtgtagattggcgcgtaatcgctattcgtaatttctactaagtgtagatttttttnnnnnnnnnnaagcttggcgtggatccgatatcaactagatcttgagacaaatggcagtattcatccacaattttaaaagaaaaggggggattggggggtacagtgcaggggaaagaatagtagacataatagcaacagacatacaaactaaag

SEQ ID NO: 18424 - DNA, 301 bp, Artificial Sequence
  Nf2.3_NTC.36
  crRNA array
  misc_feature (148)..(157): n is a, c, g, or t
cttggctttatatatcttgtggaaaggacgaaacaccgtaatttctactaagtgtagatcgtcgcctcataaataggtctaatttctactaagtgtagatcaacccgccgtagcgggccttaatttctactaagtgtagatttttttnnnnnnnnnnaagcttggcgtggatccgatatcaactagatcttgagacaaatggcagtattcatccacaattttaaaagaaaaggggggattggggggtacagtgcaggggaaagaatagtagacataatagcaacagacatacaaactaaag

SEQ ID NO: 18425 - DNA, 301 bp, Artificial Sequence
  Nf2.3_NTC.37
  crRNA array
  misc_feature (148)..(157): n is a, c, g, or t
cttggctttatatatcttgtggaaaggacgaaacaccgtaatttctactaagtgtagatcgtcgcctcataaataggtctaatttctactaagtgtagattttgcgttgacgcgattacttaatttctactaagtgtagatttttttnnnnnnnnnnaagcttggcgtggatccgatatcaactagatcttgagacaaatggcagtattcatccacaattttaaaagaaaaggggggattggggggtacagtgcaggggaaagaatagtagacataatagcaacagacatacaaactaaag

SEQ ID NO: 18426 - DNA, 301 bp, Artificial Sequence
  Nf2.3_NTC.38
  crRNA array
  misc_feature (148)..(157): n is a, c, g, or t
cttggctttatatatcttgtggaaaggacgaaacaccgtaatttctactaagtgtagatcgtcgcctcataaataggtctaatttctactaagtgtagataacggagcgcgatactaccataatttctactaagtgtagatttttttnnnnnnnnnnaagcttggcgtggatccgatatcaactagatcttgagacaaatggcagtattcatccacaattttaaaagaaaaggggggattggggggtacagtgcaggggaaagaatagtagacataatagcaacagacatacaaactaaag

SEQ ID NO: 18427 - DNA, 301 bp, Artificial Sequence
  Nf2.3_NTC.39
  crRNA array
  misc_feature (148)..(157): n is a, c, g, or t
cttggctttatatatcttgtggaaaggacgaaacaccgtaatttctactaagtgtagatcgtcgcctcataaataggtctaatttctactaagtgtagatccggacgttataacgtttcttaatttctactaagtgtagatttttttnnnnnnnnnnaagcttggcgtggatccgatatcaactagatcttgagacaaatggcagtattcatccacaattttaaaagaaaaggggggattggggggtacagtgcaggggaaagaatagtagacataatagcaacagacatacaaactaaag

SEQ ID NO: 18428 - DNA, 301 bp, Artificial Sequence
  Nf2.3_NTC.4
  crRNA array
  misc_feature (148)..(157): n is a, c, g, or t
cttggctttatatatcttgtggaaaggacgaaacaccgtaatttctactaagtgtagatcgtcgcctcataaataggtctaatttctactaagtgtagatatacccgtcgcgaacgtgagtaatttctactaagtgtagatttttttnnnnnnnnnnaagcttggcgtggatccgatatcaactagatcttgagacaaatggcagtattcatccacaattttaaaagaaaaggggggattggggggtacagtgcaggggaaagaatagtagacataatagcaacagacatacaaactaaag

SEQ ID NO: 18429 - DNA, 301 bp, Artificial Sequence
  Nf2.3_NTC.40
  crRNA array
  misc_feature (148)..(157): n is a, c, g, or t
cttggctttatatatcttgtggaaaggacgaaacaccgtaatttctactaagtgtagatcgtcgcctcataaataggtctaatttctactaagtgtagatattcgcgaacccggccggaataatttctactaagtgtagatttttttnnnnnnnnnnaagcttggcgtggatccgatatcaactagatcttgagacaaatggcagtattcatccacaattttaaaagaaaaggggggattggggggtacagtgcaggggaaagaatagtagacataatagcaacagacatacaaactaaag

SEQ ID NO: 18430 - DNA, 301 bp, Artificial Sequence
  Nf2.3_NTC.41
  crRNA array
  misc_feature (148)..(157): n is a, c, g, or t
cttggctttatatatcttgtggaaaggacgaaacaccgtaatttctactaagtgtagatcgtcgcctcataaataggtctaatttctactaagtgtagatttgatggcgcgacgcgttattaatttctactaagtgtagatttttttnnnnnnnnnnaagcttggcgtggatccgatatcaactagatcttgagacaaatggcagtattcatccacaattttaaaagaaaaggggggattggggggtacagtgcaggggaaagaatagtagacataatagcaacagacatacaaactaaag

SEQ ID NO: 18431 - DNA, 301 bp, Artificial Sequence
  Nf2.3_NTC.42
  crRNA array
  misc_feature (148)..(157): n is a, c, g, or t
cttggctttatatatcttgtggaaaggacgaaacaccgtaatttctactaagtgtagatcgtcgcctcataaataggtctaatttctactaagtgtagatggtcaaatcgcggcgataactaatttctactaagtgtagatttttttnnnnnnnnnnaagcttggcgtggatccgatatcaactagatcttgagacaaatggcagtattcatccacaattttaaaagaaaaggggggattggggggtacagtgcaggggaaagaatagtagacataatagcaacagacatacaaactaaag

SEQ ID NO: 18432 - DNA, 301 bp, Artificial Sequence
  Nf2.3_NTC.43
  crRNA array
  misc_feature (148)..(157): n is a, c, g, or t
cttggctttatatatcttgtggaaaggacgaaacaccgtaatttctactaagtgtagatcgtcgcctcataaataggtctaatttctactaagtgtagatcgactcgcgcattgaactggtaatttctactaagtgtagatttttttnnnnnnnnnnaagcttggcgtggatccgatatcaactagatcttgagacaaatggcagtattcatccacaattttaaaagaaaaggggggattggggggtacagtgcaggggaaagaatagtagacataatagcaacagacatacaaactaaag

SEQ ID NO: 18433 - DNA, 301 bp, Artificial Sequence
  Nf2.3_NTC.44
  crRNA array
  misc_feature (148)..(157): n is a, c, g, or t
cttggctttatatatcttgtggaaaggacgaaacaccgtaatttctactaagtgtagatcgtcgcctcataaataggtctaatttctactaagtgtagatagcgtcgtacgatttatcgttaatttctactaagtgtagatttttttnnnnnnnnnnaagcttggcgtggatccgatatcaactagatcttgagacaaatggcagtattcatccacaattttaaaagaaaaggggggattggggggtacagtgcaggggaaagaatagtagacataatagcaacagacatacaaactaaag

SEQ ID NO: 18434 - DNA, 301 bp, Artificial Sequence
  Nf2.3_NTC.45
  crRNA array
  misc_feature (148)..(157): n is a, c, g, or t
cttggctttatatatcttgtggaaaggacgaaacaccgtaatttctactaagtgtagatcgtcgcctcataaataggtctaatttctactaagtgtagatcggaacgcgtgatactagggtaatttctactaagtgtagatttttttnnnnnnnnnnaagcttggcgtggatccgatatcaactagatcttgagacaaatggcagtattcatccacaattttaaaagaaaaggggggattggggggtacagtgcaggggaaagaatagtagacataatagcaacagacatacaaactaaag

SEQ ID NO: 18435 - DNA, 301 bp, Artificial Sequence
  Nf2.3_NTC.46
  crRNA array
  misc_feature (148)..(157): n is a, c, g, or t
cttggctttatatatcttgtggaaaggacgaaacaccgtaatttctactaagtgtagatcgtcgcctcataaataggtctaatttctactaagtgtagatagcgggtcgtagacgcgcggtaatttctactaagtgtagatttttttnnnnnnnnnnaagcttggcgtggatccgatatcaactagatcttgagacaaatggcagtattcatccacaattttaaaagaaaaggggggattggggggtacagtgcaggggaaagaatagtagacataatagcaacagacatacaaactaaag

SEQ ID NO: 18436 - DNA, 301 bp, Artificial Sequence
  Nf2.3_NTC.47
  crRNA array
  misc_feature (148)..(157): n is a, c, g, or t
cttggctttatatatcttgtggaaaggacgaaacaccgtaatttctactaagtgtagatcgtcgcctcataaataggtctaatttctactaagtgtagattctcgtatcgcgattgttaataatttctactaagtgtagatttttttnnnnnnnnnnaagcttggcgtggatccgatatcaactagatcttgagacaaatggcagtattcatccacaattttaaaagaaaaggggggattggggggtacagtgcaggggaaagaatagtagacataatagcaacagacatacaaactaaag

SEQ ID NO: 18437 - DNA, 301 bp, Artificial Sequence
  Nf2.3_NTC.48
  crRNA array
  misc_feature (148)..(157): n is a, c, g, or t
cttggctttatatatcttgtggaaaggacgaaacaccgtaatttctactaagtgtagatcgtcgcctcataaataggtctaatttctactaagtgtagatcggtcgactacggctgttagtaatttctactaagtgtagatttttttnnnnnnnnnnaagcttggcgtggatccgatatcaactagatcttgagacaaatggcagtattcatccacaattttaaaagaaaaggggggattggggggtacagtgcaggggaaagaatagtagacataatagcaacagacatacaaactaaag

SEQ ID NO: 18438 - DNA, 301 bp, Artificial Sequence
  Nf2.3_NTC.49
  crRNA array
  misc_feature (148)..(157): n is a, c, g, or t
cttggctttatatatcttgtggaaaggacgaaacaccgtaatttctactaagtgtagatcgtcgcctcataaataggtctaatttctactaagtgtagattcggggcgcgtcaactgaattaatttctactaagtgtagatttttttnnnnnnnnnnaagcttggcgtggatccgatatcaactagatcttgagacaaatggcagtattcatccacaattttaaaagaaaaggggggattggggggtacagtgcaggggaaagaatagtagacataatagcaacagacatacaaactaaag

SEQ ID NO: 18439 - DNA, 301 bp, Artificial Sequence
  Nf2.3_NTC.5
  crRNA array
  misc_feature (148)..(157): n is a, c, g, or t
cttggctttatatatcttgtggaaaggacgaaacaccgtaatttctactaagtgtagatcgtcgcctcataaataggtctaatttctactaagtgtagatgcttacgcgtcgcgaatgtataatttctactaagtgtagatttttttnnnnnnnnnnaagcttggcgtggatccgatatcaactagatcttgagacaaatggcagtattcatccacaattttaaaagaaaaggggggattggggggtacagtgcaggggaaagaatagtagacataatagcaacagacatacaaactaaag

SEQ ID NO: 18440 - DNA, 301 bp, Artificial Sequence
  Nf2.3_NTC.50
  crRNA array
  misc_feature (148)..(157): n is a, c, g, or t
cttggctttatatatcttgtggaaaggacgaaacaccgtaatttctactaagtgtagatcgtcgcctcataaataggtctaatttctactaagtgtagatattgccgctcgcgcaaaatctaatttctactaagtgtagatttttttnnnnnnnnnnaagcttggcgtggatccgatatcaactagatcttgagacaaatggcagtattcatccacaattttaaaagaaaaggggggattggggggtacagtgcaggggaaagaatagtagacataatagcaacagacatacaaactaaag

SEQ ID NO: 18441 - DNA, 301 bp, Artificial Sequence
  Nf2.3_NTC.51
  crRNA array
  misc_feature (148)..(157): n is a, c, g, or t
cttggctttatatatcttgtggaaaggacgaaacaccgtaatttctactaagtgtagatcgtcgcctcataaataggtctaatttctactaagtgtagattaacgcgcaacacgccaatgtaatttctactaagtgtagatttttttnnnnnnnnnnaagcttggcgtggatccgatatcaactagatcttgagacaaatggcagtattcatccacaattttaaaagaaaaggggggattggggggtacagtgcaggggaaagaatagtagacataatagcaacagacatacaaactaaag

SEQ ID NO: 18442 - DNA, 301 bp, Artificial Sequence
  Nf2.3_NTC.6
  crRNA array
  misc_feature (148)..(157): n is a, c, g, or t
cttggctttatatatcttgtggaaaggacgaaacaccgtaatttctactaagtgtagatcgtcgcctcataaataggtctaatttctactaagtgtagatcgaatcgcgcctacgggaattaatttctactaagtgtagatttttttnnnnnnnnnnaagcttggcgtggatccgatatcaactagatcttgagacaaatggcagtattcatccacaattttaaaagaaaaggggggattggggggtacagtgcaggggaaagaatagtagacataatagcaacagacatacaaactaaag

SEQ ID NO: 18443 - DNA, 301 bp, Artificial Sequence
  Nf2.3_NTC.7
  crRNA array
  misc_feature (148)..(157): n is a, c, g, or t
cttggctttatatatcttgtggaaaggacgaaacaccgtaatttctactaagtgtagatcgtcgcctcataaataggtctaatttctactaagtgtagatcgccgaacggataagactattaatttctactaagtgtagatttttttnnnnnnnnnnaagcttggcgtggatccgatatcaactagatcttgagacaaatggcagtattcatccacaattttaaaagaaaaggggggattggggggtacagtgcaggggaaagaatagtagacataatagcaacagacatacaaactaaag

SEQ ID NO: 18444 - DNA, 301 bp, Artificial Sequence
  Nf2.3_NTC.8
  crRNA array
  misc_feature (148)..(157): n is a, c, g, or t
cttggctttatatatcttgtggaaaggacgaaacaccgtaatttctactaagtgtagatcgtcgcctcataaataggtctaatttctactaagtgtagatcgaccgaggttacgctgggataatttctactaagtgtagatttttttnnnnnnnnnnaagcttggcgtggatccgatatcaactagatcttgagacaaatggcagtattcatccacaattttaaaagaaaaggggggattggggggtacagtgcaggggaaagaatagtagacataatagcaacagacatacaaactaaag

SEQ ID NO: 18445 - DNA, 301 bp, Artificial Sequence
  Nf2.3_NTC.9
  crRNA array
  misc_feature (148)..(157): n is a, c, g, or t
cttggctttatatatcttgtggaaaggacgaaacaccgtaatttctactaagtgtagatcgtcgcctcataaataggtctaatttctactaagtgtagatatcgccgtacggctatggcataatttctactaagtgtagatttttttnnnnnnnnnnaagcttggcgtggatccgatatcaactagatcttgagacaaatggcagtattcatccacaattttaaaagaaaaggggggattggggggtacagtgcaggggaaagaatagtagacataatagcaacagacatacaaactaaag

SEQ ID NO: 18446 - DNA, 301 bp, Artificial Sequence
  Nf2.4_NTC.0
  crRNA array
  misc_feature (148)..(157): n is a, c, g, or t
cttggctttatatatcttgtggaaaggacgaaacaccgtaatttctactaagtgtagataaggcctcgatctccgtctttaatttctactaagtgtagattatagcgtcgcgcgctaatttaatttctactaagtgtagatttttttnnnnnnnnnnaagcttggcgtggatccgatatcaactagatcttgagacaaatggcagtattcatccacaattttaaaagaaaaggggggattggggggtacagtgcaggggaaagaatagtagacataatagcaacagacatacaaactaaag

SEQ ID NO: 18447 - DNA, 301 bp, Artificial Sequence
  Nf2.4_NTC.1
  crRNA array
  misc_feature (148)..(157): n is a, c, g, or t
cttggctttatatatcttgtggaaaggacgaaacaccgtaatttctactaagtgtagataaggcctcgatctccgtctttaatttctactaagtgtagatcgcgtaaccgttccggctcctaatttctactaagtgtagatttttttnnnnnnnnnnaagcttggcgtggatccgatatcaactagatcttgagacaaatggcagtattcatccacaattttaaaagaaaaggggggattggggggtacagtgcaggggaaagaatagtagacataatagcaacagacatacaaactaaag

SEQ ID NO: 18448 - DNA, 301 bp, Artificial Sequence
  Nf2.4_NTC.10
  crRNA array
  misc_feature (148)..(157): n is a, c, g, or t
cttggctttatatatcttgtggaaaggacgaaacaccgtaatttctactaagtgtagataaggcctcgatctccgtctttaatttctactaagtgtagatcgctaagttcgcgcgggccgtaatttctactaagtgtagatttttttnnnnnnnnnnaagcttggcgtggatccgatatcaactagatcttgagacaaatggcagtattcatccacaattttaaaagaaaaggggggattggggggtacagtgcaggggaaagaatagtagacataatagcaacagacatacaaactaaag

SEQ ID NO: 18449 - DNA, 301 bp, Artificial Sequence
  Nf2.4_NTC.11
  crRNA array
  misc_feature (148)..(157): n is a, c, g, or t
cttggctttatatatcttgtggaaaggacgaaacaccgtaatttctactaagtgtagataaggcctcgatctccgtctttaatttctactaagtgtagatcgttcgtcgacgaagcaatctaatttctactaagtgtagatttttttnnnnnnnnnnaagcttggcgtggatccgatatcaactagatcttgagacaaatggcagtattcatccacaattttaaaagaaaaggggggattggggggtacagtgcaggggaaagaatagtagacataatagcaacagacatacaaactaaag

SEQ ID NO: 18450 - DNA, 301 bp, Artificial Sequence
  Nf2.4_NTC.12
  crRNA array
  misc_feature (148)..(157): n is a, c, g, or t
cttggctttatatatcttgtggaaaggacgaaacaccgtaatttctactaagtgtagataaggcctcgatctccgtctttaatttctactaagtgtagatcgccgacgattaatcaatagtaatttctactaagtgtagatttttttnnnnnnnnnnaagcttggcgtggatccgatatcaactagatcttgagacaaatggcagtattcatccacaattttaaaagaaaaggggggattggggggtacagtgcaggggaaagaatagtagacataatagcaacagacatacaaactaaag

SEQ ID NO: 18451 - DNA, 301 bp, Artificial Sequence
  Nf2.4_NTC.13
  crRNA array
  misc_feature (148)..(157): n is a, c, g, or t
cttggctttatatatcttgtggaaaggacgaaacaccgtaatttctactaagtgtagataaggcctcgatctccgtctttaatttctactaagtgtagatgaccgttgtatcgcgatcaataatttctactaagtgtagatttttttnnnnnnnnnnaagcttggcgtggatccgatatcaactagatcttgagacaaatggcagtattcatccacaattttaaaagaaaaggggggattggggggtacagtgcaggggaaagaatagtagacataatagcaacagacatacaaactaaag

SEQ ID NO: 18452 - DNA, 301 bp, Artificial Sequence
  Nf2.4_NTC.14
  crRNA array
  misc_feature (148)..(157): n is a, c, g, or t
cttggctttatatatcttgtggaaaggacgaaacaccgtaatttctactaagtgtagataaggcctcgatctccgtctttaatttctactaagtgtagatccgttcgtgcgatagtgttttaatttctactaagtgtagatttttttnnnnnnnnnnaagcttggcgtggatccgatatcaactagatcttgagacaaatggcagtattcatccacaattttaaaagaaaaggggggattggggggtacagtgcaggggaaagaatagtagacataatagcaacagacatacaaactaaag

SEQ ID NO: 18453 - DNA, 301 bp, Artificial Sequence
  Nf2.4_NTC.15
  crRNA array
  misc_feature (148)..(157): n is a, c, g, or t
cttggctttatatatcttgtggaaaggacgaaacaccgtaatttctactaagtgtagataaggcctcgatctccgtctttaatttctactaagtgtagatgttgtcgtgccgcgaatttataatttctactaagtgtagatttttttnnnnnnnnnnaagcttggcgtggatccgatatcaactagatcttgagacaaatggcagtattcatccacaattttaaaagaaaaggggggattggggggtacagtgcaggggaaagaatagtagacataatagcaacagacatacaaactaaag

SEQ ID NO: 18454 - DNA, 301 bp, Artificial Sequence
  Nf2.4_NTC.16
  crRNA array
  misc_feature (148)..(157): n is a, c, g, or t
cttggctttatatatcttgtggaaaggacgaaacaccgtaatttctactaagtgtagataaggcctcgatctccgtctttaatttctactaagtgtagatcggtacgttagacgaaaatttaatttctactaagtgtagatttttttnnnnnnnnnnaagcttggcgtggatccgatatcaactagatcttgagacaaatggcagtattcatccacaattttaaaagaaaaggggggattggggggtacagtgcaggggaaagaatagtagacataatagcaacagacatacaaactaaag

SEQ ID NO: 18455 - DNA, 301 bp, Artificial Sequence
  Nf2.4_NTC.17
  crRNA array
  misc_feature (148)..(157): n is a, c, g, or t
cttggctttatatatcttgtggaaaggacgaaacaccgtaatttctactaagtgtagataaggcctcgatctccgtctttaatttctactaagtgtagattatcgaacgctatcgaacgttaatttctactaagtgtagatttttttnnnnnnnnnnaagcttggcgtggatccgatatcaactagatcttgagacaaatggcagtattcatccacaattttaaaagaaaaggggggattggggggtacagtgcaggggaaagaatagtagacataatagcaacagacatacaaactaaag

SEQ ID NO: 18456 - DNA, 301 bp, Artificial Sequence
  Nf2.4_NTC.18
  crRNA array
  misc_feature (148)..(157): n is a, c, g, or t
cttggctttatatatcttgtggaaaggacgaaacaccgtaatttctactaagtgtagataaggcctcgatctccgtctttaatttctactaagtgtagattccggttacgaccggcaaaataatttctactaagtgtagatttttttnnnnnnnnnnaagcttggcgtggatccgatatcaactagatcttgagacaaatggcagtattcatccacaattttaaaagaaaaggggggattggggggtacagtgcaggggaaagaatagtagacataatagcaacagacatacaaactaaag

SEQ ID NO: 18457 - DNA, 301 bp, Artificial Sequence
  Nf2.4_NTC.19
  crRNA array
  misc_feature (148)..(157): n is a, c, g, or t
cttggctttatatatcttgtggaaaggacgaaacaccgtaatttctactaagtgtagataaggcctcgatctccgtctttaatttctactaagtgtagatcgtcgtagaacgatacccgataatttctactaagtgtagatttttttnnnnnnnnnnaagcttggcgtggatccgatatcaactagatcttgagacaaatggcagtattcatccacaattttaaaagaaaaggggggattggggggtacagtgcaggggaaagaatagtagacataatagcaacagacatacaaactaaag

SEQ ID NO: 18458 - DNA, 301 bp, Artificial Sequence
  Nf2.4_NTC.2
  crRNA array
  misc_feature (148)..(157): n is a, c, g, or t
cttggctttatatatcttgtggaaaggacgaaacaccgtaatttctactaagtgtagataaggcctcgatctccgtctttaatttctactaagtgtagatttatgtcgcgccgcgacccgtaatttctactaagtgtagatttttttnnnnnnnnnnaagcttggcgtggatccgatatcaactagatcttgagacaaatggcagtattcatccacaattttaaaagaaaaggggggattggggggtacagtgcaggggaaagaatagtagacataatagcaacagacatacaaactaaag

SEQ ID NO: 18459 - DNA, 301 bp, Artificial Sequence
  Nf2.4_NTC.20
  crRNA array
  misc_feature (148)..(157): n is a, c, g, or t
cttggctttatatatcttgtggaaaggacgaaacaccgtaatttctactaagtgtagataaggcctcgatctccgtctttaatttctactaagtgtagatattccggcgcgaccagaagataatttctactaagtgtagatttttttnnnnnnnnnnaagcttggcgtggatccgatatcaactagatcttgagacaaatggcagtattcatccacaattttaaaagaaaaggggggattggggggtacagtgcaggggaaagaatagtagacataatagcaacagacatacaaactaaag

SEQ ID NO: 18460 - DNA, 301 bp, Artificial Sequence
  Nf2.4_NTC.21
  crRNA array
  misc_feature (148)..(157): n is a, c, g, or t
cttggctttatatatcttgtggaaaggacgaaacaccgtaatttctactaagtgtagataaggcctcgatctccgtctttaatttctactaagtgtagatgtataacttcgcgcggtccgtaatttctactaagtgtagatttttttnnnnnnnnnnaagcttggcgtggatccgatatcaactagatcttgagacaaatggcagtattcatccacaattttaaaagaaaaggggggattggggggtacagtgcaggggaaagaatagtagacataatagcaacagacatacaaactaaag

SEQ ID NO: 18461 - DNA, 301 bp, Artificial Sequence
  Nf2.4_NTC.22
  crRNA array
  misc_feature (148)..(157): n is a, c, g, or t
cttggctttatatatcttgtggaaaggacgaaacaccgtaatttctactaagtgtagataaggcctcgatctccgtctttaatttctactaagtgtagatgcgcgtcaacgtaatgtgcctaatttctactaagtgtagatttttttnnnnnnnnnnaagcttggcgtggatccgatatcaactagatcttgagacaaatggcagtattcatccacaattttaaaagaaaaggggggattggggggtacagtgcaggggaaagaatagtagacataatagcaacagacatacaaactaaag

SEQ ID NO: 18462 - DNA, 301 bp, Artificial Sequence
  Nf2.4_NTC.23
  crRNA array
  misc_feature (148)..(157): n is a, c, g, or t
cttggctttatatatcttgtggaaaggacgaaacaccgtaatttctactaagtgtagataaggcctcgatctccgtctttaatttctactaagtgtagatacgcgctattatcgtaggtgtaatttctactaagtgtagatttttttnnnnnnnnnnaagcttggcgtggatccgatatcaactagatcttgagacaaatggcagtattcatccacaattttaaaagaaaaggggggattggggggtacagtgcaggggaaagaatagtagacataatagcaacagacatacaaactaaag

SEQ ID NO: 18463 - DNA, 301 bp, Artificial Sequence
  Nf2.4_NTC.24
  crRNA array
  misc_feature (148)..(157): n is a, c, g, or t
cttggctttatatatcttgtggaaaggacgaaacaccgtaatttctactaagtgtagataaggcctcgatctccgtctttaatttctactaagtgtagatactatcgacgttcgtcccggtaatttctactaagtgtagatttttttnnnnnnnnnnaagcttggcgtggatccgatatcaactagatcttgagacaaatggcagtattcatccacaattttaaaagaaaaggggggattggggggtacagtgcaggggaaagaatagtagacataatagcaacagacatacaaactaaag

SEQ ID NO: 18464 - DNA, 301 bp, Artificial Sequence
  Nf2.4_NTC.25
  crRNA array
  misc_feature (148)..(157): n is a, c, g, or t
cttggctttatatatcttgtggaaaggacgaaacaccgtaatttctactaagtgtagataaggcctcgatctccgtctttaatttctactaagtgtagattcgcgttatcgtgccgtgcgtaatttctactaagtgtagatttttttnnnnnnnnnnaagcttggcgtggatccgatatcaactagatcttgagacaaatggcagtattcatccacaattttaaaagaaaaggggggattggggggtacagtgcaggggaaagaatagtagacataatagcaacagacatacaaactaaag

SEQ ID NO: 18465 - DNA, 301 bp, Artificial Sequence
  Nf2.4_NTC.26
  crRNA array
  misc_feature (148)..(157): n is a, c, g, or t
cttggctttatatatcttgtggaaaggacgaaacaccgtaatttctactaagtgtagataaggcctcgatctccgtctttaatttctactaagtgtagatcgcgacggcggttttaacactaatttctactaagtgtagatttttttnnnnnnnnnnaagcttggcgtggatccgatatcaactagatcttgagacaaatggcagtattcatccacaattttaaaagaaaaggggggattggggggtacagtgcaggggaaagaatagtagacataatagcaacagacatacaaactaaag

SEQ ID NO: 18466 - DNA, 301 bp, Artificial Sequence
  Nf2.4_NTC.27
  crRNA array
  misc_feature (148)..(157): n is a, c, g, or t
cttggctttatatatcttgtggaaaggacgaaacaccgtaatttctactaagtgtagataaggcctcgatctccgtctttaatttctactaagtgtagatgtcgcgttgcgaccggcgcttaatttctactaagtgtagatttttttnnnnnnnnnnaagcttggcgtggatccgatatcaactagatcttgagacaaatggcagtattcatccacaattttaaaagaaaaggggggattggggggtacagtgcaggggaaagaatagtagacataatagcaacagacatacaaactaaag

SEQ ID NO: 18467 - DNA, 301 bp, Artificial Sequence
  Nf2.4_NTC.28
  crRNA array
  misc_feature (148)..(157): n is a, c, g, or t
cttggctttatatatcttgtggaaaggacgaaacaccgtaatttctactaagtgtagataaggcctcgatctccgtctttaatttctactaagtgtagataccgctaatcggcgtaaacttaatttctactaagtgtagatttttttnnnnnnnnnnaagcttggcgtggatccgatatcaactagatcttgagacaaatggcagtattcatccacaattttaaaagaaaaggggggattggggggtacagtgcaggggaaagaatagtagacataatagcaacagacatacaaactaaag

SEQ ID NO: 18468 - DNA, 301 bp, Artificial Sequence
  Nf2.4_NTC.29
  crRNA array
  misc_feature (148)..(157): n is a, c, g, or t
cttggctttatatatcttgtggaaaggacgaaacaccgtaatttctactaagtgtagataaggcctcgatctccgtctttaatttctactaagtgtagatcgcgatctataccgtctatataatttctactaagtgtagatttttttnnnnnnnnnnaagcttggcgtggatccgatatcaactagatcttgagacaaatggcagtattcatccacaattttaaaagaaaaggggggattggggggtacagtgcaggggaaagaatagtagacataatagcaacagacatacaaactaaag

SEQ ID NO: 18469 - DNA, 301 bp, Artificial Sequence
  Nf2.4_NTC.3
  crRNA array
  misc_feature (148)..(157): n is a, c, g, or t
cttggctttatatatcttgtggaaaggacgaaacaccgtaatttctactaagtgtagataaggcctcgatctccgtctttaatttctactaagtgtagattcgacgcgagacgacgtacataatttctactaagtgtagatttttttnnnnnnnnnnaagcttggcgtggatccgatatcaactagatcttgagacaaatggcagtattcatccacaattttaaaagaaaaggggggattggggggtacagtgcaggggaaagaatagtagacataatagcaacagacatacaaactaaag

SEQ ID NO: 18470 - DNA, 301 bp, Artificial Sequence
  Nf2.4_NTC.30
  crRNA array
  misc_feature (148)..(157): n is a, c, g, or t
cttggctttatatatcttgtggaaaggacgaaacaccgtaatttctactaagtgtagataaggcctcgatctccgtctttaatttctactaagtgtagatcgatcgtacgggtgtcctaataatttctactaagtgtagatttttttnnnnnnnnnnaagcttggcgtggatccgatatcaactagatcttgagacaaatggcagtattcatccacaattttaaaagaaaaggggggattggggggtacagtgcaggggaaagaatagtagacataatagcaacagacatacaaactaaag

SEQ ID NO: 18471 - DNA, 301 bp, Artificial Sequence
  Nf2.4_NTC.31
  crRNA array
  misc_feature (148)..(157): n is a, c, g, or t
cttggctttatatatcttgtggaaaggacgaaacaccgtaatttctactaagtgtagataaggcctcgatctccgtctttaatttctactaagtgtagatgccgaccgcgtgattgtaggtaatttctactaagtgtagatttttttnnnnnnnnnnaagcttggcgtggatccgatatcaactagatcttgagacaaatggcagtattcatccacaattttaaaagaaaaggggggattggggggtacagtgcaggggaaagaatagtagacataatagcaacagacatacaaactaaag

SEQ ID NO: 18472 - DNA, 301 bp, Artificial Sequence
  Nf2.4_NTC.32
  crRNA array
  misc_feature (148)..(157): n is a, c, g, or t
cttggctttatatatcttgtggaaaggacgaaacaccgtaatttctactaagtgtagataaggcctcgatctccgtctttaatttctactaagtgtagatgcacgttacgcccgggtcactaatttctactaagtgtagatttttttnnnnnnnnnnaagcttggcgtggatccgatatcaactagatcttgagacaaatggcagtattcatccacaattttaaaagaaaaggggggattggggggtacagtgcaggggaaagaatagtagacataatagcaacagacatacaaactaaag

SEQ ID NO: 18473 - DNA, 301 bp, Artificial Sequence
  Nf2.4_NTC.33
  crRNA array
  misc_feature (148)..(157): n is a, c, g, or t
cttggctttatatatcttgtggaaaggacgaaacaccgtaatttctactaagtgtagataaggcctcgatctccgtctttaatttctactaagtgtagattaagcgaccgacgcattcgctaatttctactaagtgtagatttttttnnnnnnnnnnaagcttggcgtggatccgatatcaactagatcttgagacaaatggcagtattcatccacaattttaaaagaaaaggggggattggggggtacagtgcaggggaaagaatagtagacataatagcaacagacatacaaactaaag

SEQ ID NO: 18474 - DNA, 301 bp, Artificial Sequence
  Nf2.4_NTC.34
  crRNA array
  misc_feature (148)..(157): n is a, c, g, or t
cttggctttatatatcttgtggaaaggacgaaacaccgtaatttctactaagtgtagataaggcctcgatctccgtctttaatttctactaagtgtagattagcgttcgacacgtgaaactaatttctactaagtgtagatttttttnnnnnnnnnnaagcttggcgtggatccgatatcaactagatcttgagacaaatggcagtattcatccacaattttaaaagaaaaggggggattggggggtacagtgcaggggaaagaatagtagacataatagcaacagacatacaaactaaag

SEQ ID NO: 18475 - DNA, 301 bp, Artificial Sequence
  Nf2.4_NTC.35
  crRNA array
  misc_feature (148)..(157): n is a, c, g, or t
cttggctttatatatcttgtggaaaggacgaaacaccgtaatttctactaagtgtagataaggcctcgatctccgtctttaatttctactaagtgtagattggcgcgtaatcgctattcgtaatttctactaagtgtagatttttttnnnnnnnnnnaagcttggcgtggatccgatatcaactagatcttgagacaaatggcagtattcatccacaattttaaaagaaaaggggggattggggggtacagtgcaggggaaagaatagtagacataatagcaacagacatacaaactaaag

SEQ ID NO: 18476 - DNA, 301 bp, Artificial Sequence
  Nf2.4_NTC.36
  crRNA array
  misc_feature (148)..(157): n is a, c, g, or t
cttggctttatatatcttgtggaaaggacgaaacaccgtaatttctactaagtgtagataaggcctcgatctccgtctttaatttctactaagtgtagatcaacccgccgtagcgggccttaatttctactaagtgtagatttttttnnnnnnnnnnaagcttggcgtggatccgatatcaactagatcttgagacaaatggcagtattcatccacaattttaaaagaaaaggggggattggggggtacagtgcaggggaaagaatagtagacataatagcaacagacatacaaactaaag

SEQ ID NO: 18477 - DNA, 301 bp, Artificial Sequence
  Nf2.4_NTC.37
  crRNA array
  misc_feature (148)..(157): n is a, c, g, or t
cttggctttatatatcttgtggaaaggacgaaacaccgtaatttctactaagtgtagataaggcctcgatctccgtctttaatttctactaagtgtagattttgcgttgacgcgattacttaatttctactaagtgtagatttttttnnnnnnnnnnaagcttggcgtggatccgatatcaactagatcttgagacaaatggcagtattcatccacaattttaaaagaaaaggggggattggggggtacagtgcaggggaaagaatagtagacataatagcaacagacatacaaactaaag

SEQ ID NO: 18478 - DNA, 301 bp, Artificial Sequence
  Nf2.4_NTC.38
  crRNA array
  misc_feature (148)..(157): n is a, c, g, or t
cttggctttatatatcttgtggaaaggacgaaacaccgtaatttctactaagtgtagataaggcctcgatctccgtctttaatttctactaagtgtagataacggagcgcgatactaccataatttctactaagtgtagatttttttnnnnnnnnnnaagcttggcgtggatccgatatcaactagatcttgagacaaatggcagtattcatccacaattttaaaagaaaaggggggattggggggtacagtgcaggggaaagaatagtagacataatagcaacagacatacaaactaaag

SEQ ID NO: 18479 - DNA, 301 bp, Artificial Sequence
  Nf2.4_NTC.39
  crRNA array
  misc_feature (148)..(157): n is a, c, g, or t
cttggctttatatatcttgtggaaaggacgaaacaccgtaatttctactaagtgtagataaggcctcgatctccgtctttaatttctactaagtgtagatccggacgttataacgtttcttaatttctactaagtgtagatttttttnnnnnnnnnnaagcttggcgtggatccgatatcaactagatcttgagacaaatggcagtattcatccacaattttaaaagaaaaggggggattggggggtacagtgcaggggaaagaatagtagacataatagcaacagacatacaaactaaag

SEQ ID NO: 18480 - DNA, 301 bp, Artificial Sequence
  Nf2.4_NTC.4
  crRNA array
  misc_feature (148)..(157): n is a, c, g, or t
cttggctttatatatcttgtggaaaggacgaaacaccgtaatttctactaagtgtagataaggcctcgatctccgtctttaatttctactaagtgtagatatacccgtcgcgaacgtgagtaatttctactaagtgtagatttttttnnnnnnnnnnaagcttggcgtggatccgatatcaactagatcttgagacaaatggcagtattcatccacaattttaaaagaaaaggggggattggggggtacagtgcaggggaaagaatagtagacataatagcaacagacatacaaactaaag

SEQ ID NO: 18481 - DNA, 301 bp, Artificial Sequence
  Nf2.4_NTC.40
  crRNA array
  misc_feature (148)..(157): n is a, c, g, or t
cttggctttatatatcttgtggaaaggacgaaacaccgtaatttctactaagtgtagataaggcctcgatctccgtctttaatttctactaagtgtagatattcgcgaacccggccggaataatttctactaagtgtagatttttttnnnnnnnnnnaagcttggcgtggatccgatatcaactagatcttgagacaaatggcagtattcatccacaattttaaaagaaaaggggggattggggggtacagtgcaggggaaagaatagtagacataatagcaacagacatacaaactaaag

SEQ ID NO: 18482 - DNA, 301 bp, Artificial Sequence
  Nf2.4_NTC.41
  crRNA array
  misc_feature (148)..(157): n is a, c, g, or t
cttggctttatatatcttgtggaaaggacgaaacaccgtaatttctactaagtgtagataaggcctcgatctccgtctttaatttctactaagtgtagatttgatggcgcgacgcgttattaatttctactaagtgtagatttttttnnnnnnnnnnaagcttggcgtggatccgatatcaactagatcttgagacaaatggcagtattcatccacaattttaaaagaaaaggggggattggggggtacagtgcaggggaaagaatagtagacataatagcaacagacatacaaactaaag

SEQ ID NO: 18483 - DNA, 301 bp, Artificial Sequence
  Nf2.4_NTC.42
  crRNA array
  misc_feature (148)..(157): n is a, c, g, or t
cttggctttatatatcttgtggaaaggacgaaacaccgtaatttctactaagtgtagataaggcctcgatctccgtctttaatttctactaagtgtagatggtcaaatcgcggcgataactaatttctactaagtgtagatttttttnnnnnnnnnnaagcttggcgtggatccgatatcaactagatcttgagacaaatggcagtattcatccacaattttaaaagaaaaggggggattggggggtacagtgcaggggaaagaatagtagacataatagcaacagacatacaaactaaag

SEQ ID NO: 18484 - DNA, 301 bp, Artificial Sequence
  Nf2.4_NTC.43
  crRNA array
  misc_feature (148)..(157): n is a, c, g, or t
cttggctttatatatcttgtggaaaggacgaaacaccgtaatttctactaagtgtagataaggcctcgatctccgtctttaatttctactaagtgtagatcgactcgcgcattgaactggtaatttctactaagtgtagatttttttnnnnnnnnnnaagcttggcgtggatccgatatcaactagatcttgagacaaatggcagtattcatccacaattttaaaagaaaaggggggattggggggtacagtgcaggggaaagaatagtagacataatagcaacagacatacaaactaaag

SEQ ID NO: 18485 - DNA, 301 bp, Artificial Sequence
  Nf2.4_NTC.44
  crRNA array
  misc_feature (148)..(157): n is a, c, g, or t
cttggctttatatatcttgtggaaaggacgaaacaccgtaatttctactaagtgtagataaggcctcgatctccgtctttaatttctactaagtgtagatagcgtcgtacgatttatcgttaatttctactaagtgtagatttttttnnnnnnnnnnaagcttggcgtggatccgatatcaactagatcttgagacaaatggcagtattcatccacaattttaaaagaaaaggggggattggggggtacagtgcaggggaaagaatagtagacataatagcaacagacatacaaactaaag

SEQ ID NO: 18486 - DNA, 301 bp, Artificial Sequence
  Nf2.4_NTC.45
  crRNA array
  misc_feature (148)..(157): n is a, c, g, or t
cttggctttatatatcttgtggaaaggacgaaacaccgtaatttctactaagtgtagataaggcctcgatctccgtctttaatttctactaagtgtagatcggaacgcgtgatactagggtaatttctactaagtgtagatttttttnnnnnnnnnnaagcttggcgtggatccgatatcaactagatcttgagacaaatggcagtattcatccacaattttaaaagaaaaggggggattggggggtacagtgcaggggaaagaatagtagacataatagcaacagacatacaaactaaag

SEQ ID NO: 18487 - DNA, 301 bp, Artificial Sequence
  Nf2.4_NTC.46
  crRNA array
  misc_feature (148)..(157): n is a, c, g, or t
cttggctttatatatcttgtggaaaggacgaaacaccgtaatttctactaagtgtagataaggcctcgatctccgtctttaatttctactaagtgtagatagcgggtcgtagacgcgcggtaatttctactaagtgtagatttttttnnnnnnnnnnaagcttggcgtggatccgatatcaactagatcttgagacaaatggcagtattcatccacaattttaaaagaaaaggggggattggggggtacagtgcaggggaaagaatagtagacataatagcaacagacatacaaactaaag

SEQ ID NO: 18488 - DNA, 301 bp, Artificial Sequence
  Nf2.4_NTC.47
  crRNA array
  misc_feature (148)..(157): n is a, c, g, or t
cttggctttatatatcttgtggaaaggacgaaacaccgtaatttctactaagtgtagataaggcctcgatctccgtctttaatttctactaagtgtagattctcgtatcgcgattgttaataatttctactaagtgtagatttttttnnnnnnnnnnaagcttggcgtggatccgatatcaactagatcttgagacaaatggcagtattcatccacaattttaaaagaaaaggggggattggggggtacagtgcaggggaaagaatagtagacataatagcaacagacatacaaactaaag

SEQ ID NO: 18489 - DNA, 301 bp, Artificial Sequence
  Nf2.4_NTC.48
  crRNA array
  misc_feature (148)..(157): n is a, c, g, or t
cttggctttatatatcttgtggaaaggacgaaacaccgtaatttctactaagtgtagataaggcctcgatctccgtctttaatttctactaagtgtagatcggtcgactacggctgttagtaatttctactaagtgtagatttttttnnnnnnnnnnaagcttggcgtggatccgatatcaactagatcttgagacaaatggcagtattcatccacaattttaaaagaaaaggggggattggggggtacagtgcaggggaaagaatagtagacataatagcaacagacatacaaactaaag

SEQ ID NO: 18490 - DNA, 301 bp, Artificial Sequence
  Nf2.4_NTC.49
  crRNA array
  misc_feature (148)..(157): n is a, c, g, or t
cttggctttatatatcttgtggaaaggacgaaacaccgtaatttctactaagtgtagataaggcctcgatctccgtctttaatttctactaagtgtagattcggggcgcgtcaactgaattaatttctactaagtgtagatttttttnnnnnnnnnnaagcttggcgtggatccgatatcaactagatcttgagacaaatggcagtattcatccacaattttaaaagaaaaggggggattggggggtacagtgcaggggaaagaatagtagacataatagcaacagacatacaaactaaag

SEQ ID NO: 18491 - DNA, 301 bp, Artificial Sequence
  Nf2.4_NTC.5
  crRNA array
  misc_feature (148)..(157): n is a, c, g, or t
cttggctttatatatcttgtggaaaggacgaaacaccgtaatttctactaagtgtagataaggcctcgatctccgtctttaatttctactaagtgtagatgcttacgcgtcgcgaatgtataatttctactaagtgtagatttttttnnnnnnnnnnaagcttggcgtggatccgatatcaactagatcttgagacaaatggcagtattcatccacaattttaaaagaaaaggggggattggggggtacagtgcaggggaaagaatagtagacataatagcaacagacatacaaactaaag

SEQ ID NO: 18492 - DNA, 301 bp, Artificial Sequence
  Nf2.4_NTC.50
  crRNA array
  misc_feature (148)..(157): n is a, c, g, or t
cttggctttatatatcttgtggaaaggacgaaacaccgtaatttctactaagtgtagataaggcctcgatctccgtctttaatttctactaagtgtagatattgccgctcgcgcaaaatctaatttctactaagtgtagatttttttnnnnnnnnnnaagcttggcgtggatccgatatcaactagatcttgagacaaatggcagtattcatccacaattttaaaagaaaaggggggattggggggtacagtgcaggggaaagaatagtagacataatagcaacagacatacaaactaaag

SEQ ID NO: 18493 - DNA, 301 bp, Artificial Sequence
  Nf2.4_NTC.51
  crRNA array
  misc_feature (148)..(157): n is a, c, g, or t
cttggctttatatatcttgtggaaaggacgaaacaccgtaatttctactaagtgtagataaggcctcgatctccgtctttaatttctactaagtgtagattaacgcgcaacacgccaatgtaatttctactaagtgtagatttttttnnnnnnnnnnaagcttggcgtggatccgatatcaactagatcttgagacaaatggcagtattcatccacaattttaaaagaaaaggggggattggggggtacagtgcaggggaaagaatagtagacataatagcaacagacatacaaactaaag

SEQ ID NO: 18494 - DNA, 301 bp, Artificial Sequence
  Nf2.4_NTC.6
  crRNA array
  misc_feature (148)..(157): n is a, c, g, or t
cttggctttatatatcttgtggaaaggacgaaacaccgtaatttctactaagtgtagataaggcctcgatctccgtctttaatttctactaagtgtagatcgaatcgcgcctacgggaattaatttctactaagtgtagatttttttnnnnnnnnnnaagcttggcgtggatccgatatcaactagatcttgagacaaatggcagtattcatccacaattttaaaagaaaaggggggattggggggtacagtgcaggggaaagaatagtagacataatagcaacagacatacaaactaaag

SEQ ID NO: 18495 - DNA, 301 bp, Artificial Sequence
  Nf2.4_NTC.7
  crRNA array
  misc_feature (148)..(157): n is a, c, g, or t
cttggctttatatatcttgtggaaaggacgaaacaccgtaatttctactaagtgtagataaggcctcgatctccgtctttaatttctactaagtgtagatcgccgaacggataagactattaatttctactaagtgtagatttttttnnnnnnnnnnaagcttggcgtggatccgatatcaactagatcttgagacaaatggcagtattcatccacaattttaaaagaaaaggggggattggggggtacagtgcaggggaaagaatagtagacataatagcaacagacatacaaactaaag

SEQ ID NO: 18496 - DNA, 301 bp, Artificial Sequence
  Nf2.4_NTC.8
  crRNA array
  misc_feature (148)..(157): n is a, c, g, or t
cttggctttatatatcttgtggaaaggacgaaacaccgtaatttctactaagtgtagataaggcctcgatctccgtctttaatttctactaagtgtagatcgaccgaggttacgctgggataatttctactaagtgtagatttttttnnnnnnnnnnaagcttggcgtggatccgatatcaactagatcttgagacaaatggcagtattcatccacaattttaaaagaaaaggggggattggggggtacagtgcaggggaaagaatagtagacataatagcaacagacatacaaactaaag

SEQ ID NO: 18497 - DNA, 301 bp, Artificial Sequence
  Nf2.4_NTC.9
  crRNA array
  misc_feature (148)..(157): n is a, c, g, or t
cttggctttatatatcttgtggaaaggacgaaacaccgtaatttctactaagtgtagataaggcctcgatctccgtctttaatttctactaagtgtagatatcgccgtacggctatggcataatttctactaagtgtagatttttttnnnnnnnnnnaagcttggcgtggatccgatatcaactagatcttgagacaaatggcagtattcatccacaattttaaaagaaaaggggggattggggggtacagtgcaggggaaagaatagtagacataatagcaacagacatacaaactaaag

SEQ ID NO: 18498 - DNA, 301 bp, Artificial Sequence
  Notch1.1_NTC.0
  crRNA array
  misc_feature (148)..(157): n is a, c, g, or t
cttggctttatatatcttgtggaaaggacgaaacaccgtaatttctactaagtgtagattgggccaacgatgccaggactaatttctactaagtgtagattatagcgtcgcgcgctaatttaatttctactaagtgtagatttttttnnnnnnnnnnaagcttggcgtggatccgatatcaactagatcttgagacaaatggcagtattcatccacaattttaaaagaaaaggggggattggggggtacagtgcaggggaaagaatagtagacataatagcaacagacatacaaactaaag

SEQ ID NO: 18499 - DNA, 301 bp, Artificial Sequence
  Notch1.1_NTC.1
  crRNA array
  misc_feature (148)..(157): n is a, c, g, or t
cttggctttatatatcttgtggaaaggacgaaacaccgtaatttctactaagtgtagattgggccaacgatgccaggactaatttctactaagtgtagatcgcgtaaccgttccggctcctaatttctactaagtgtagatttttttnnnnnnnnnnaagcttggcgtggatccgatatcaactagatcttgagacaaatggcagtattcatccacaattttaaaagaaaaggggggattggggggtacagtgcaggggaaagaatagtagacataatagcaacagacatacaaactaaag

SEQ ID NO: 18500 - DNA, 301 bp, Artificial Sequence
  Notch1.1_NTC.10
  crRNA array
  misc_feature (148)..(157): n is a, c, g, or t
cttggctttatatatcttgtggaaaggacgaaacaccgtaatttctactaagtgtagattgggccaacgatgccaggactaatttctactaagtgtagatcgctaagttcgcgcgggccgtaatttctactaagtgtagatttttttnnnnnnnnnnaagcttggcgtggatccgatatcaactagatcttgagacaaatggcagtattcatccacaattttaaaagaaaaggggggattggggggtacagtgcaggggaaagaatagtagacataatagcaacagacatacaaactaaag

SEQ ID NO: 18501 - DNA, 301 bp, Artificial Sequence
  Notch1.1_NTC.11
  crRNA array
  misc_feature (148)..(157): n is a, c, g, or t
cttggctttatatatcttgtggaaaggacgaaacaccgtaatttctactaagtgtagattgggccaacgatgccaggactaatttctactaagtgtagatcgttcgtcgacgaagcaatctaatttctactaagtgtagatttttttnnnnnnnnnnaagcttggcgtggatccgatatcaactagatcttgagacaaatggcagtattcatccacaattttaaaagaaaaggggggattggggggtacagtgcaggggaaagaatagtagacataatagcaacagacatacaaactaaag

SEQ ID NO: 18502 - DNA, 301 bp, Artificial Sequence
  Notch1.1_NTC.12
  crRNA array
  misc_feature (148)..(157): n is a, c, g, or t
cttggctttatatatcttgtggaaaggacgaaacaccgtaatttctactaagtgtagattgggccaacgatgccaggactaatttctactaagtgtagatcgccgacgattaatcaatagtaatttctactaagtgtagatttttttnnnnnnnnnnaagcttggcgtggatccgatatcaactagatcttgagacaaatggcagtattcatccacaattttaaaagaaaaggggggattggggggtacagtgcaggggaaagaatagtagacataatagcaacagacatacaaactaaag

SEQ ID NO: 18503 - DNA, 301 bp, Artificial Sequence
  Notch1.1_NTC.13
  crRNA array
  misc_feature (148)..(157): n is a, c, g, or t
cttggctttatatatcttgtggaaaggacgaaacaccgtaatttctactaagtgtagattgggccaacgatgccaggactaatttctactaagtgtagatgaccgttgtatcgcgatcaataatttctactaagtgtagatttttttnnnnnnnnnnaagcttggcgtggatccgatatcaactagatcttgagacaaatggcagtattcatccacaattttaaaagaaaaggggggattggggggtacagtgcaggggaaagaatagtagacataatagcaacagacatacaaactaaag

SEQ ID NO: 18504 - DNA, 301 bp, Artificial Sequence
  Notch1.1_NTC.14
  crRNA array
  misc_feature (148)..(157): n is a, c, g, or t
cttggctttatatatcttgtggaaaggacgaaacaccgtaatttctactaagtgtagattgggccaacgatgccaggactaatttctactaagtgtagatccgttcgtgcgatagtgttttaatttctactaagtgtagatttttttnnnnnnnnnnaagcttggcgtggatccgatatcaactagatcttgagacaaatggcagtattcatccacaattttaaaagaaaaggggggattggggggtacagtgcaggggaaagaatagtagacataatagcaacagacatacaaactaaag

SEQ ID NO: 18505 - DNA, 301 bp, Artificial Sequence
  Notch1.1_NTC.15
  crRNA array
  misc_feature (148)..(157): n is a, c, g, or t
cttggctttatatatcttgtggaaaggacgaaacaccgtaatttctactaagtgtagattgggccaacgatgccaggactaatttctactaagtgtagatgttgtcgtgccgcgaatttataatttctactaagtgtagatttttttnnnnnnnnnnaagcttggcgtggatccgatatcaactagatcttgagacaaatggcagtattcatccacaattttaaaagaaaaggggggattggggggtacagtgcaggggaaagaatagtagacataatagcaacagacatacaaactaaag

SEQ ID NO: 18506 - DNA, 301 bp, Artificial Sequence
  Notch1.1_NTC.16
  crRNA array
  misc_feature (148)..(157): n is a, c, g, or t
cttggctttatatatcttgtggaaaggacgaaacaccgtaatttctactaagtgtagattgggccaacgatgccaggactaatttctactaagtgtagatcggtacgttagacgaaaatttaatttctactaagtgtagatttttttnnnnnnnnnnaagcttggcgtggatccgatatcaactagatcttgagacaaatggcagtattcatccacaattttaaaagaaaaggggggattggggggtacagtgcaggggaaagaatagtagacataatagcaacagacatacaaactaaag

SEQ ID NO: 18507 - DNA, 301 bp, Artificial Sequence
  Notch1.1_NTC.17
  crRNA array
  misc_feature (148)..(157): n is a, c, g, or t
cttggctttatatatcttgtggaaaggacgaaacaccgtaatttctactaagtgtagattgggccaacgatgccaggactaatttctactaagtgtagattatcgaacgctatcgaacgttaatttctactaagtgtagatttttttnnnnnnnnnnaagcttggcgtggatccgatatcaactagatcttgagacaaatggcagtattcatccacaattttaaaagaaaaggggggattggggggtacagtgcaggggaaagaatagtagacataatagcaacagacatacaaactaaag

SEQ ID NO: 18508 - DNA, 301 bp, Artificial Sequence
  Notch1.1_NTC.18
  crRNA array
  misc_feature (148)..(157): n is a, c, g, or t
cttggctttatatatcttgtggaaaggacgaaacaccgtaatttctactaagtgtagattgggccaacgatgccaggactaatttctactaagtgtagattccggttacgaccggcaaaataatttctactaagtgtagatttttttnnnnnnnnnnaagcttggcgtggatccgatatcaactagatcttgagacaaatggcagtattcatccacaattttaaaagaaaaggggggattggggggtacagtgcaggggaaagaatagtagacataatagcaacagacatacaaactaaag

SEQ ID NO: 18509 - DNA, 301 bp, Artificial Sequence
  Notch1.1_NTC.19
  crRNA array
  misc_feature (148)..(157): n is a, c, g, or t
cttggctttatatatcttgtggaaaggacgaaacaccgtaatttctactaagtgtagattgggccaacgatgccaggactaatttctactaagtgtagatcgtcgtagaacgatacccgataatttctactaagtgtagatttttttnnnnnnnnnnaagcttggcgtggatccgatatcaactagatcttgagacaaatggcagtattcatccacaattttaaaagaaaaggggggattggggggtacagtgcaggggaaagaatagtagacataatagcaacagacatacaaactaaag

SEQ ID NO: 18510 - DNA, 301 bp, Artificial Sequence
  Notch1.1_NTC.2
  crRNA array
  misc_feature (148)..(157): n is a, c, g, or t
cttggctttatatatcttgtggaaaggacgaaacaccgtaatttctactaagtgtagattgggccaacgatgccaggactaatttctactaagtgtagatttatgtcgcgccgcgacccgtaatttctactaagtgtagatttttttnnnnnnnnnnaagcttggcgtggatccgatatcaactagatcttgagacaaatggcagtattcatccacaattttaaaagaaaaggggggattggggggtacagtgcaggggaaagaatagtagacataatagcaacagacatacaaactaaag

SEQ ID NO: 18511 - DNA, 301 bp, Artificial Sequence
  Notch1.1_NTC.20
  crRNA array
  misc_feature (148)..(157): n is a, c, g, or t
cttggctttatatatcttgtggaaaggacgaaacaccgtaatttctactaagtgtagattgggccaacgatgccaggactaatttctactaagtgtagatattccggcgcgaccagaagataatttctactaagtgtagatttttttnnnnnnnnnnaagcttggcgtggatccgatatcaactagatcttgagacaaatggcagtattcatccacaattttaaaagaaaaggggggattggggggtacagtgcaggggaaagaatagtagacataatagcaacagacatacaaactaaag

SEQ ID NO: 18512 - DNA, 301 bp, Artificial Sequence
  Notch1.1_NTC.21
  crRNA array
  misc_feature (148)..(157): n is a, c, g, or t
cttggctttatatatcttgtggaaaggacgaaacaccgtaatttctactaagtgtagattgggccaacgatgccaggactaatttctactaagtgtagatgtataacttcgcgcggtccgtaatttctactaagtgtagatttttttnnnnnnnnnnaagcttggcgtggatccgatatcaactagatcttgagacaaatggcagtattcatccacaattttaaaagaaaaggggggattggggggtacagtgcaggggaaagaatagtagacataatagcaacagacatacaaactaaag

SEQ ID NO: 18513 - DNA, 301 bp, Artificial Sequence
  Notch1.1_NTC.22
  crRNA array
  misc_feature (148)..(157): n is a, c, g, or t
cttggctttatatatcttgtggaaaggacgaaacaccgtaatttctactaagtgtagattgggccaacgatgccaggactaatttctactaagtgtagatgcgcgtcaacgtaatgtgcctaatttctactaagtgtagatttttttnnnnnnnnnnaagcttggcgtggatccgatatcaactagatcttgagacaaatggcagtattcatccacaattttaaaagaaaaggggggattggggggtacagtgcaggggaaagaatagtagacataatagcaacagacatacaaactaaag

SEQ ID NO: 18514 - DNA, 301 bp, Artificial Sequence
  Notch1.1_NTC.23
  crRNA array
  misc_feature (148)..(157): n is a, c, g, or t
cttggctttatatatcttgtggaaaggacgaaacaccgtaatttctactaagtgtagattgggccaacgatgccaggactaatttctactaagtgtagatacgcgctattatcgtaggtgtaatttctactaagtgtagatttttttnnnnnnnnnnaagcttggcgtggatccgatatcaactagatcttgagacaaatggcagtattcatccacaattttaaaagaaaaggggggattggggggtacagtgcaggggaaagaatagtagacataatagcaacagacatacaaactaaag

SEQ ID NO: 18515 - DNA, 301 bp, Artificial Sequence
  Notch1.1_NTC.24
  crRNA array
  misc_feature (148)..(157): n is a, c, g, or t
cttggctttatatatcttgtggaaaggacgaaacaccgtaatttctactaagtgtagattgggccaacgatgccaggactaatttctactaagtgtagatactatcgacgttcgtcccggtaatttctactaagtgtagatttttttnnnnnnnnnnaagcttggcgtggatccgatatcaactagatcttgagacaaatggcagtattcatccacaattttaaaagaaaaggggggattggggggtacagtgcaggggaaagaatagtagacataatagcaacagacatacaaactaaag

SEQ ID NO: 18516 - DNA, 301 bp, Artificial Sequence
  Notch1.1_NTC.25
  crRNA array
  misc_feature (148)..(157): n is a, c, g, or t
cttggctttatatatcttgtggaaaggacgaaacaccgtaatttctactaagtgtagattgggccaacgatgccaggactaatttctactaagtgtagattcgcgttatcgtgccgtgcgtaatttctactaagtgtagatttttttnnnnnnnnnnaagcttggcgtggatccgatatcaactagatcttgagacaaatggcagtattcatccacaattttaaaagaaaaggggggattggggggtacagtgcaggggaaagaatagtagacataatagcaacagacatacaaactaaag

SEQ ID NO: 18517 - DNA, 301 bp, Artificial Sequence
  Notch1.1_NTC.26
  crRNA array
  misc_feature (148)..(157): n is a, c, g, or t
cttggctttatatatcttgtggaaaggacgaaacaccgtaatttctactaagtgtagattgggccaacgatgccaggactaatttctactaagtgtagatcgcgacggcggttttaacactaatttctactaagtgtagatttttttnnnnnnnnnnaagcttggcgtggatccgatatcaactagatcttgagacaaatggcagtattcatccacaattttaaaagaaaaggggggattggggggtacagtgcaggggaaagaatagtagacataatagcaacagacatacaaactaaag

SEQ ID NO: 18518 - DNA, 301 bp, Artificial Sequence
  Notch1.1_NTC.27
  crRNA array
  misc_feature (148)..(157): n is a, c, g, or t
cttggctttatatatcttgtggaaaggacgaaacaccgtaatttctactaagtgtagattgggccaacgatgccaggactaatttctactaagtgtagatgtcgcgttgcgaccggcgcttaatttctactaagtgtagatttttttnnnnnnnnnnaagcttggcgtggatccgatatcaactagatcttgagacaaatggcagtattcatccacaattttaaaagaaaaggggggattggggggtacagtgcaggggaaagaatagtagacataatagcaacagacatacaaactaaag

SEQ ID NO: 18519 - DNA, 301 bp, Artificial Sequence
  Notch1.1_NTC.28
  crRNA array
  misc_feature (148)..(157): n is a, c, g, or t
cttggctttatatatcttgtggaaaggacgaaacaccgtaatttctactaagtgtagattgggccaacgatgccaggactaatttctactaagtgtagataccgctaatcggcgtaaacttaatttctactaagtgtagatttttttnnnnnnnnnnaagcttggcgtggatccgatatcaactagatcttgagacaaatggcagtattcatccacaattttaaaagaaaaggggggattggggggtacagtgcaggggaaagaatagtagacataatagcaacagacatacaaactaaag

SEQ ID NO: 18520 - DNA, 301 bp, Artificial Sequence
  Notch1.1_NTC.29
  crRNA array
  misc_feature (148)..(157): n is a, c, g, or t
cttggctttatatatcttgtggaaaggacgaaacaccgtaatttctactaagtgtagattgggccaacgatgccaggactaatttctactaagtgtagatcgcgatctataccgtctatataatttctactaagtgtagatttttttnnnnnnnnnnaagcttggcgtggatccgatatcaactagatcttgagacaaatggcagtattcatccacaattttaaaagaaaaggggggattggggggtacagtgcaggggaaagaatagtagacataatagcaacagacatacaaactaaag

SEQ ID NO: 18521 - DNA, 301 bp, Artificial Sequence
  Notch1.1_NTC.3
  crRNA array
  misc_feature (148)..(157): n is a, c, g, or t
cttggctttatatatcttgtggaaaggacgaaacaccgtaatttctactaagtgtagattgggccaacgatgccaggactaatttctactaagtgtagattcgacgcgagacgacgtacataatttctactaagtgtagatttttttnnnnnnnnnnaagcttggcgtggatccgatatcaactagatcttgagacaaatggcagtattcatccacaattttaaaagaaaaggggggattggggggtacagtgcaggggaaagaatagtagacataatagcaacagacatacaaactaaag

SEQ ID NO: 18522 - DNA, 301 bp, Artificial Sequence
  Notch1.1_NTC.30
  crRNA array
  misc_feature (148)..(157): n is a, c, g, or t
cttggctttatatatcttgtggaaaggacgaaacaccgtaatttctactaagtgtagattgggccaacgatgccaggactaatttctactaagtgtagatcgatcgtacgggtgtcctaataatttctactaagtgtagatttttttnnnnnnnnnnaagcttggcgtggatccgatatcaactagatcttgagacaaatggcagtattcatccacaattttaaaagaaaaggggggattggggggtacagtgcaggggaaagaatagtagacataatagcaacagacatacaaactaaag

SEQ ID NO: 18523 - DNA, 301 bp, Artificial Sequence
  Notch1.1_NTC.31
  crRNA array
  misc_feature (148)..(157): n is a, c, g, or t
cttggctttatatatcttgtggaaaggacgaaacaccgtaatttctactaagtgtagattgggccaacgatgccaggactaatttctactaagtgtagatgccgaccgcgtgattgtaggtaatttctactaagtgtagatttttttnnnnnnnnnnaagcttggcgtggatccgatatcaactagatcttgagacaaatggcagtattcatccacaattttaaaagaaaaggggggattggggggtacagtgcaggggaaagaatagtagacataatagcaacagacatacaaactaaag

SEQ ID NO: 18524 - DNA, 301 bp, Artificial Sequence
  Notch1.1_NTC.32
  crRNA array
  misc_feature (148)..(157): n is a, c, g, or t
cttggctttatatatcttgtggaaaggacgaaacaccgtaatttctactaagtgtagattgggccaacgatgccaggactaatttctactaagtgtagatgcacgttacgcccgggtcactaatttctactaagtgtagatttttttnnnnnnnnnnaagcttggcgtggatccgatatcaactagatcttgagacaaatggcagtattcatccacaattttaaaagaaaaggggggattggggggtacagtgcaggggaaagaatagtagacataatagcaacagacatacaaactaaag

SEQ ID NO: 18525 - DNA, 301 bp, Artificial Sequence
  Notch1.1_NTC.33
  crRNA array
  misc_feature (148)..(157): n is a, c, g, or t
cttggctttatatatcttgtggaaaggacgaaacaccgtaatttctactaagtgtagattgggccaacgatgccaggactaatttctactaagtgtagattaagcgaccgacgcattcgctaatttctactaagtgtagatttttttnnnnnnnnnnaagcttggcgtggatccgatatcaactagatcttgagacaaatggcagtattcatccacaattttaaaagaaaaggggggattggggggtacagtgcaggggaaagaatagtagacataatagcaacagacatacaaactaaag

SEQ ID NO: 18526 - DNA, 301 bp, Artificial Sequence
  Notch1.1_NTC.34
  crRNA array
  misc_feature (148)..(157): n is a, c, g, or t
cttggctttatatatcttgtggaaaggacgaaacaccgtaatttctactaagtgtagattgggccaacgatgccaggactaatttctactaagtgtagattagcgttcgacacgtgaaactaatttctactaagtgtagatttttttnnnnnnnnnnaagcttggcgtggatccgatatcaactagatcttgagacaaatggcagtattcatccacaattttaaaagaaaaggggggattggggggtacagtgcaggggaaagaatagtagacataatagcaacagacatacaaactaaag

SEQ ID NO: 18527 - DNA, 301 bp, Artificial Sequence
  Notch1.1_NTC.35
  crRNA array
  misc_feature (148)..(157): n is a, c, g, or t
cttggctttatatatcttgtggaaaggacgaaacaccgtaatttctactaagtgtagattgggccaacgatgccaggactaatttctactaagtgtagattggcgcgtaatcgctattcgtaatttctactaagtgtagatttttttnnnnnnnnnnaagcttggcgtggatccgatatcaactagatcttgagacaaatggcagtattcatccacaattttaaaagaaaaggggggattggggggtacagtgcaggggaaagaatagtagacataatagcaacagacatacaaactaaag

SEQ ID NO: 18528 - DNA, 301 bp, Artificial Sequence
  Notch1.1_NTC.36
  crRNA array
  misc_feature (148)..(157): n is a, c, g, or t
cttggctttatatatcttgtggaaaggacgaaacaccgtaatttctactaagtgtagattgggccaacgatgccaggactaatttctactaagtgtagatcaacccgccgtagcgggccttaatttctactaagtgtagatttttttnnnnnnnnnnaagcttggcgtggatccgatatcaactagatcttgagacaaatggcagtattcatccacaattttaaaagaaaaggggggattggggggtacagtgcaggggaaagaatagtagacataatagcaacagacatacaaactaaag

SEQ ID NO: 18529 - DNA, 301 bp, Artificial Sequence
  Notch1.1_NTC.37
  crRNA array
  misc_feature (148)..(157): n is a, c, g, or t
cttggctttatatatcttgtggaaaggacgaaacaccgtaatttctactaagtgtagattgggccaacgatgccaggactaatttctactaagtgtagattttgcgttgacgcgattacttaatttctactaagtgtagatttttttnnnnnnnnnnaagcttggcgtggatccgatatcaactagatcttgagacaaatggcagtattcatccacaattttaaaagaaaaggggggattggggggtacagtgcaggggaaagaatagtagacataatagcaacagacatacaaactaaag

SEQ ID NO: 18530 - DNA, 301 bp, Artificial Sequence
  Notch1.1_NTC.38
  crRNA array
  misc_feature (148)..(157): n is a, c, g, or t
cttggctttatatatcttgtggaaaggacgaaacaccgtaatttctactaagtgtagattgggccaacgatgccaggactaatttctactaagtgtagataacggagcgcgatactaccataatttctactaagtgtagatttttttnnnnnnnnnnaagcttggcgtggatccgatatcaactagatcttgagacaaatggcagtattcatccacaattttaaaagaaaaggggggattggggggtacagtgcaggggaaagaatagtagacataatagcaacagacatacaaactaaag

SEQ ID NO: 18531 - DNA, 301 bp, Artificial Sequence
  Notch1.1_NTC.39
  crRNA array
  misc_feature (148)..(157): n is a, c, g, or t
cttggctttatatatcttgtggaaaggacgaaacaccgtaatttctactaagtgtagattgggccaacgatgccaggactaatttctactaagtgtagatccggacgttataacgtttcttaatttctactaagtgtagatttttttnnnnnnnnnnaagcttggcgtggatccgatatcaactagatcttgagacaaatggcagtattcatccacaattttaaaagaaaaggggggattggggggtacagtgcaggggaaagaatagtagacataatagcaacagacatacaaactaaag

SEQ ID NO: 18532 - DNA, 301 bp, Artificial Sequence
  Notch1.1_NTC.4
  crRNA array
  misc_feature (148)..(157): n is a, c, g, or t
cttggctttatatatcttgtggaaaggacgaaacaccgtaatttctactaagtgtagattgggccaacgatgccaggactaatttctactaagtgtagatatacccgtcgcgaacgtgagtaatttctactaagtgtagatttttttnnnnnnnnnnaagcttggcgtggatccgatatcaactagatcttgagacaaatggcagtattcatccacaattttaaaagaaaaggggggattggggggtacagtgcaggggaaagaatagtagacataatagcaacagacatacaaactaaag

SEQ ID NO: 18533 - DNA, 301 bp, Artificial Sequence
  Notch1.1_NTC.40
  crRNA array
  misc_feature (148)..(157): n is a, c, g, or t
cttggctttatatatcttgtggaaaggacgaaacaccgtaatttctactaagtgtagattgggccaacgatgccaggactaatttctactaagtgtagatattcgcgaacccggccggaataatttctactaagtgtagatttttttnnnnnnnnnnaagcttggcgtggatccgatatcaactagatcttgagacaaatggcagtattcatccacaattttaaaagaaaaggggggattggggggtacagtgcaggggaaagaatagtagacataatagcaacagacatacaaactaaag

SEQ ID NO: 18534 - DNA, 301 bp, Artificial Sequence
  Notch1.1_NTC.41
  crRNA array
  misc_feature (148)..(157): n is a, c, g, or t
cttggctttatatatcttgtggaaaggacgaaacaccgtaatttctactaagtgtagattgggccaacgatgccaggactaatttctactaagtgtagatttgatggcgcgacgcgttattaatttctactaagtgtagatttttttnnnnnnnnnnaagcttggcgtggatccgatatcaactagatcttgagacaaatggcagtattcatccacaattttaaaagaaaaggggggattggggggtacagtgcaggggaaagaatagtagacataatagcaacagacatacaaactaaag

SEQ ID NO: 18535 - DNA, 301 bp, Artificial Sequence
  Notch1.1_NTC.42
  crRNA array
  misc_feature (148)..(157): n is a, c, g, or t
cttggctttatatatcttgtggaaaggacgaaacaccgtaatttctactaagtgtagattgggccaacgatgccaggactaatttctactaagtgtagatggtcaaatcgcggcgataactaatttctactaagtgtagatttttttnnnnnnnnnnaagcttggcgtggatccgatatcaactagatcttgagacaaatggcagtattcatccacaattttaaaagaaaaggggggattggggggtacagtgcaggggaaagaatagtagacataatagcaacagacatacaaactaaag

SEQ ID NO: 18536 - DNA, 301 bp, Artificial Sequence
  Notch1.1_NTC.43
  crRNA array
  misc_feature (148)..(157): n is a, c, g, or t
cttggctttatatatcttgtggaaaggacgaaacaccgtaatttctactaagtgtagattgggccaacgatgccaggactaatttctactaagtgtagatcgactcgcgcattgaactggtaatttctactaagtgtagatttttttnnnnnnnnnnaagcttggcgtggatccgatatcaactagatcttgagacaaatggcagtattcatccacaattttaaaagaaaaggggggattggggggtacagtgcaggggaaagaatagtagacataatagcaacagacatacaaactaaag

SEQ ID NO: 18537 - DNA, 301 bp, Artificial Sequence
  Notch1.1_NTC.44
  crRNA array
  misc_feature (148)..(157): n is a, c, g, or t
cttggctttatatatcttgtggaaaggacgaaacaccgtaatttctactaagtgtagattgggccaacgatgccaggactaatttctactaagtgtagatagcgtcgtacgatttatcgttaatttctactaagtgtagatttttttnnnnnnnnnnaagcttggcgtggatccgatatcaactagatcttgagacaaatggcagtattcatccacaattttaaaagaaaaggggggattggggggtacagtgcaggggaaagaatagtagacataatagcaacagacatacaaactaaag

SEQ ID NO: 18538 - DNA, 301 bp, Artificial Sequence
  Notch1.1_NTC.45
  crRNA array
  misc_feature (148)..(157): n is a, c, g, or t
cttggctttatatatcttgtggaaaggacgaaacaccgtaatttctactaagtgtagattgggccaacgatgccaggactaatttctactaagtgtagatcggaacgcgtgatactagggtaatttctactaagtgtagatttttttnnnnnnnnnnaagcttggcgtggatccgatatcaactagatcttgagacaaatggcagtattcatccacaattttaaaagaaaaggggggattggggggtacagtgcaggggaaagaatagtagacataatagcaacagacatacaaactaaag

SEQ ID NO: 18539 - DNA, 301 bp, Artificial Sequence
  Notch1.1_NTC.46
  crRNA array
  misc_feature (148)..(157): n is a, c, g, or t
cttggctttatatatcttgtggaaaggacgaaacaccgtaatttctactaagtgtagattgggccaacgatgccaggactaatttctactaagtgtagatagcgggtcgtagacgcgcggtaatttctactaagtgtagatttttttnnnnnnnnnnaagcttggcgtggatccgatatcaactagatcttgagacaaatggcagtattcatccacaattttaaaagaaaaggggggattggggggtacagtgcaggggaaagaatagtagacataatagcaacagacatacaaactaaag

SEQ ID NO: 18540 - DNA, 301 bp, Artificial Sequence
  Notch1.1_NTC.47
  crRNA array
  misc_feature (148)..(157): n is a, c, g, or t
cttggctttatatatcttgtggaaaggacgaaacaccgtaatttctactaagtgtagattgggccaacgatgccaggactaatttctactaagtgtagattctcgtatcgcgattgttaataatttctactaagtgtagatttttttnnnnnnnnnnaagcttggcgtggatccgatatcaactagatcttgagacaaatggcagtattcatccacaattttaaaagaaaaggggggattggggggtacagtgcaggggaaagaatagtagacataatagcaacagacatacaaactaaag

SEQ ID NO: 18541 - DNA, 301 bp, Artificial Sequence
  Notch1.1_NTC.48
  crRNA array
  misc_feature (148)..(157): n is a, c, g, or t
cttggctttatatatcttgtggaaaggacgaaacaccgtaatttctactaagtgtagattgggccaacgatgccaggactaatttctactaagtgtagatcggtcgactacggctgttagtaatttctactaagtgtagatttttttnnnnnnnnnnaagcttggcgtggatccgatatcaactagatcttgagacaaatggcagtattcatccacaattttaaaagaaaaggggggattggggggtacagtgcaggggaaagaatagtagacataatagcaacagacatacaaactaaag

SEQ ID NO: 18542 - DNA, 301 bp, Artificial Sequence
  Notch1.1_NTC.49
  crRNA array
  misc_feature (148)..(157): n is a, c, g, or t
cttggctttatatatcttgtggaaaggacgaaacaccgtaatttctactaagtgtagattgggccaacgatgccaggactaatttctactaagtgtagattcggggcgcgtcaactgaattaatttctactaagtgtagatttttttnnnnnnnnnnaagcttggcgtggatccgatatcaactagatcttgagacaaatggcagtattcatccacaattttaaaagaaaaggggggattggggggtacagtgcaggggaaagaatagtagacataatagcaacagacatacaaactaaag

SEQ ID NO: 18543 - DNA, 301 bp, Artificial Sequence
  Notch1.1_NTC.5
  crRNA array
  misc_feature (148)..(157): n is a, c, g, or t
cttggctttatatatcttgtggaaaggacgaaacaccgtaatttctactaagtgtagattgggccaacgatgccaggactaatttctactaagtgtagatgcttacgcgtcgcgaatgtataatttctactaagtgtagatttttttnnnnnnnnnnaagcttggcgtggatccgatatcaactagatcttgagacaaatggcagtattcatccacaattttaaaagaaaaggggggattggggggtacagtgcaggggaaagaatagtagacataatagcaacagacatacaaactaaag

SEQ ID NO: 18544 - DNA, 301 bp, Artificial Sequence
  Notch1.1_NTC.50
  crRNA array
  misc_feature (148)..(157): n is a, c, g, or t
cttggctttatatatcttgtggaaaggacgaaacaccgtaatttctactaagtgtagattgggccaacgatgccaggactaatttctactaagtgtagatattgccgctcgcgcaaaatctaatttctactaagtgtagatttttttnnnnnnnnnnaagcttggcgtggatccgatatcaactagatcttgagacaaatggcagtattcatccacaattttaaaagaaaaggggggattggggggtacagtgcaggggaaagaatagtagacataatagcaacagacatacaaactaaag

SEQ ID NO: 18545 - DNA, 301 bp, Artificial Sequence
  Notch1.1_NTC.51
  crRNA array
  misc_feature (148)..(157): n is a, c, g, or t
cttggctttatatatcttgtggaaaggacgaaacaccgtaatttctactaagtgtagattgggccaacgatgccaggactaatttctactaagtgtagattaacgcgcaacacgccaatgtaatttctactaagtgtagatttttttnnnnnnnnnnaagcttggcgtggatccgatatcaactagatcttgagacaaatggcagtattcatccacaattttaaaagaaaaggggggattggggggtacagtgcaggggaaagaatagtagacataatagcaacagacatacaaactaaag

SEQ ID NO: 18546 - DNA, 301 bp, Artificial Sequence
  Notch1.1_NTC.6
  crRNA array
  misc_feature (148)..(157): n is a, c, g, or t
cttggctttatatatcttgtggaaaggacgaaacaccgtaatttctactaagtgtagattgggccaacgatgccaggactaatttctactaagtgtagatcgaatcgcgcctacgggaattaatttctactaagtgtagatttttttnnnnnnnnnnaagcttggcgtggatccgatatcaactagatcttgagacaaatggcagtattcatccacaattttaaaagaaaaggggggattggggggtacagtgcaggggaaagaatagtagacataatagcaacagacatacaaactaaag

SEQ ID NO: 18547 - DNA, 301 bp, Artificial Sequence
  Notch1.1_NTC.7
  crRNA array
  misc_feature (148)..(157): n is a, c, g, or t
cttggctttatatatcttgtggaaaggacgaaacaccgtaatttctactaagtgtagattgggccaacgatgccaggactaatttctactaagtgtagatcgccgaacggataagactattaatttctactaagtgtagatttttttnnnnnnnnnnaagcttggcgtggatccgatatcaactagatcttgagacaaatggcagtattcatccacaattttaaaagaaaaggggggattggggggtacagtgcaggggaaagaatagtagacataatagcaacagacatacaaactaaag

SEQ ID NO: 18548 - DNA, 301 bp, Artificial Sequence
  Notch1.1_NTC.8
  crRNA array
  misc_feature (148)..(157): n is a, c, g, or t
cttggctttatatatcttgtggaaaggacgaaacaccgtaatttctactaagtgtagattgggccaacgatgccaggactaatttctactaagtgtagatcgaccgaggttacgctgggataatttctactaagtgtagatttttttnnnnnnnnnnaagcttggcgtggatccgatatcaactagatcttgagacaaatggcagtattcatccacaattttaaaagaaaaggggggattggggggtacagtgcaggggaaagaatagtagacataatagcaacagacatacaaactaaag

SEQ ID NO: 18549 - DNA, 301 bp, Artificial Sequence
  Notch1.1_NTC.9
  crRNA array
  misc_feature (148)..(157): n is a, c, g, or t
cttggctttatatatcttgtggaaaggacgaaacaccgtaatttctactaagtgtagattgggccaacgatgccaggactaatttctactaagtgtagatatcgccgtacggctatggcataatttctactaagtgtagatttttttnnnnnnnnnnaagcttggcgtggatccgatatcaactagatcttgagacaaatggcagtattcatccacaattttaaaagaaaaggggggattggggggtacagtgcaggggaaagaatagtagacataatagcaacagacatacaaactaaag

SEQ ID NO: 18550 - DNA, 301 bp, Artificial Sequence
  Notch1.2_NTC.0
  crRNA array
  misc_feature (148)..(157): n is a, c, g, or t
cttggctttatatatcttgtggaaaggacgaaacaccgtaatttctactaagtgtagatgtcgccccagcatcctgaagtaatttctactaagtgtagattatagcgtcgcgcgctaatttaatttctactaagtgtagatttttttnnnnnnnnnnaagcttggcgtggatccgatatcaactagatcttgagacaaatggcagtattcatccacaattttaaaagaaaaggggggattggggggtacagtgcaggggaaagaatagtagacataatagcaacagacatacaaactaaag

SEQ ID NO: 18551 - DNA, 301 bp, Artificial Sequence
  Notch1.2_NTC.1
  crRNA array
  misc_feature (148)..(157): n is a, c, g, or t
cttggctttatatatcttgtggaaaggacgaaacaccgtaatttctactaagtgtagatgtcgccccagcatcctgaagtaatttctactaagtgtagatcgcgtaaccgttccggctcctaatttctactaagtgtagatttttttnnnnnnnnnnaagcttggcgtggatccgatatcaactagatcttgagacaaatggcagtattcatccacaattttaaaagaaaaggggggattggggggtacagtgcaggggaaagaatagtagacataatagcaacagacatacaaactaaag

SEQ ID NO: 18552 - DNA, 301 bp, Artificial Sequence
  Notch1.2_NTC.10
  crRNA array
  misc_feature (148)..(157): n is a, c, g, or t
cttggctttatatatcttgtggaaaggacgaaacaccgtaatttctactaagtgtagatgtcgccccagcatcctgaagtaatttctactaagtgtagatcgctaagttcgcgcgggccgtaatttctactaagtgtagatttttttnnnnnnnnnnaagcttggcgtggatccgatatcaactagatcttgagacaaatggcagtattcatccacaattttaaaagaaaaggggggattggggggtacagtgcaggggaaagaatagtagacataatagcaacagacatacaaactaaag

SEQ ID NO: 18553 - DNA, 301 bp, Artificial Sequence
  Notch1.2_NTC.11
  crRNA array
  misc_feature (148)..(157): n is a, c, g, or t
cttggctttatatatcttgtggaaaggacgaaacaccgtaatttctactaagtgtagatgtcgccccagcatcctgaagtaatttctactaagtgtagatcgttcgtcgacgaagcaatctaatttctactaagtgtagatttttttnnnnnnnnnnaagcttggcgtggatccgatatcaactagatcttgagacaaatggcagtattcatccacaattttaaaagaaaaggggggattggggggtacagtgcaggggaaagaatagtagacataatagcaacagacatacaaactaaag

SEQ ID NO: 18554 - DNA, 301 bp, Artificial Sequence
  Notch1.2_NTC.12
  crRNA array
  misc_feature (148)..(157): n is a, c, g, or t
cttggctttatatatcttgtggaaaggacgaaacaccgtaatttctactaagtgtagatgtcgccccagcatcctgaagtaatttctactaagtgtagatcgccgacgattaatcaatagtaatttctactaagtgtagatttttttnnnnnnnnnnaagcttggcgtggatccgatatcaactagatcttgagacaaatggcagtattcatccacaattttaaaagaaaaggggggattggggggtacagtgcaggggaaagaatagtagacataatagcaacagacatacaaactaaag

SEQ ID NO: 18555 - DNA, 301 bp, Artificial Sequence
  Notch1.2_NTC.13
  crRNA array
  misc_feature (148)..(157): n is a, c, g, or t
cttggctttatatatcttgtggaaaggacgaaacaccgtaatttctactaagtgtagatgtcgccccagcatcctgaagtaatttctactaagtgtagatgaccgttgtatcgcgatcaataatttctactaagtgtagatttttttnnnnnnnnnnaagcttggcgtggatccgatatcaactagatcttgagacaaatggcagtattcatccacaattttaaaagaaaaggggggattggggggtacagtgcaggggaaagaatagtagacataatagcaacagacatacaaactaaag

SEQ ID NO: 18556 - DNA, 301 bp, Artificial Sequence
  Notch1.2_NTC.14
  crRNA array
  misc_feature (148)..(157): n is a, c, g, or t
cttggctttatatatcttgtggaaaggacgaaacaccgtaatttctactaagtgtagatgtcgccccagcatcctgaagtaatttctactaagtgtagatccgttcgtgcgatagtgttttaatttctactaagtgtagatttttttnnnnnnnnnnaagcttggcgtggatccgatatcaactagatcttgagacaaatggcagtattcatccacaattttaaaagaaaaggggggattggggggtacagtgcaggggaaagaatagtagacataatagcaacagacatacaaactaaag

SEQ ID NO: 18557 - DNA, 301 bp, Artificial Sequence
  Notch1.2_NTC.15
  crRNA array
  misc_feature (148)..(157): n is a, c, g, or t
cttggctttatatatcttgtggaaaggacgaaacaccgtaatttctactaagtgtagatgtcgccccagcatcctgaagtaatttctactaagtgtagatgttgtcgtgccgcgaatttataatttctactaagtgtagatttttttnnnnnnnnnnaagcttggcgtggatccgatatcaactagatcttgagacaaatggcagtattcatccacaattttaaaagaaaaggggggattggggggtacagtgcaggggaaagaatagtagacataatagcaacagacatacaaactaaag

SEQ ID NO: 18558 - DNA, 301 bp, Artificial Sequence
  Notch1.2_NTC.16
  crRNA array
  misc_feature (148)..(157): n is a, c, g, or t
cttggctttatatatcttgtggaaaggacgaaacaccgtaatttctactaagtgtagatgtcgccccagcatcctgaagtaatttctactaagtgtagatcggtacgttagacgaaaatttaatttctactaagtgtagatttttttnnnnnnnnnnaagcttggcgtggatccgatatcaactagatcttgagacaaatggcagtattcatccacaattttaaaagaaaaggggggattggggggtacagtgcaggggaaagaatagtagacataatagcaacagacatacaaactaaag

SEQ ID NO: 18559 - DNA, 301 bp, Artificial Sequence
  Notch1.2_NTC.17
  crRNA array
  misc_feature (148)..(157): n is a, c, g, or t
cttggctttatatatcttgtggaaaggacgaaacaccgtaatttctactaagtgtagatgtcgccccagcatcctgaagtaatttctactaagtgtagattatcgaacgctatcgaacgttaatttctactaagtgtagatttttttnnnnnnnnnnaagcttggcgtggatccgatatcaactagatcttgagacaaatggcagtattcatccacaattttaaaagaaaaggggggattggggggtacagtgcaggggaaagaatagtagacataatagcaacagacatacaaactaaag

SEQ ID NO: 18560 - DNA, 301 bp, Artificial Sequence
  Notch1.2_NTC.18
  crRNA array
  misc_feature (148)..(157): n is a, c, g, or t
cttggctttatatatcttgtggaaaggacgaaacaccgtaatttctactaagtgtagatgtcgccccagcatcctgaagtaatttctactaagtgtagattccggttacgaccggcaaaataatttctactaagtgtagatttttttnnnnnnnnnnaagcttggcgtggatccgatatcaactagatcttgagacaaatggcagtattcatccacaattttaaaagaaaaggggggattggggggtacagtgcaggggaaagaatagtagacataatagcaacagacatacaaactaaag

SEQ ID NO: 18561 - DNA, 301 bp, Artificial Sequence
  Notch1.2_NTC.19
  crRNA array
  misc_feature (148)..(157): n is a, c, g, or t
cttggctttatatatcttgtggaaaggacgaaacaccgtaatttctactaagtgtagatgtcgccccagcatcctgaagtaatttctactaagtgtagatcgtcgtagaacgatacccgataatttctactaagtgtagatttttttnnnnnnnnnnaagcttggcgtggatccgatatcaactagatcttgagacaaatggcagtattcatccacaattttaaaagaaaaggggggattggggggtacagtgcaggggaaagaatagtagacataatagcaacagacatacaaactaaag

SEQ ID NO: 18562 - DNA, 301 bp, Artificial Sequence
  Notch1.2_NTC.2
  crRNA array
  misc_feature (148)..(157): n is a, c, g, or t
cttggctttatatatcttgtggaaaggacgaaacaccgtaatttctactaagtgtagatgtcgccccagcatcctgaagtaatttctactaagtgtagatttatgtcgcgccgcgacccgtaatttctactaagtgtagatttttttnnnnnnnnnnaagcttggcgtggatccgatatcaactagatcttgagacaaatggcagtattcatccacaattttaaaagaaaaggggggattggggggtacagtgcaggggaaagaatagtagacataatagcaacagacatacaaactaaag

SEQ ID NO: 18563 - DNA, 301 bp, Artificial Sequence
  Notch1.2_NTC.20
  crRNA array
  misc_feature (148)..(157): n is a, c, g, or t
cttggctttatatatcttgtggaaaggacgaaacaccgtaatttctactaagtgtagatgtcgccccagcatcctgaagtaatttctactaagtgtagatattccggcgcgaccagaagataatttctactaagtgtagatttttttnnnnnnnnnnaagcttggcgtggatccgatatcaactagatcttgagacaaatggcagtattcatccacaattttaaaagaaaaggggggattggggggtacagtgcaggggaaagaatagtagacataatagcaacagacatacaaactaaag

SEQ ID NO: 18564 - DNA, 301 bp, Artificial Sequence
  Notch1.2_NTC.21
  crRNA array
  misc_feature (148)..(157): n is a, c, g, or t
cttggctttatatatcttgtggaaaggacgaaacaccgtaatttctactaagtgtagatgtcgccccagcatcctgaagtaatttctactaagtgtagatgtataacttcgcgcggtccgtaatttctactaagtgtagatttttttnnnnnnnnnnaagcttggcgtggatccgatatcaactagatcttgagacaaatggcagtattcatccacaattttaaaagaaaaggggggattggggggtacagtgcaggggaaagaatagtagacataatagcaacagacatacaaactaaag

SEQ ID NO: 18565 - DNA, 301 bp, Artificial Sequence
  Notch1.2_NTC.22
  crRNA array
  misc_feature (148)..(157): n is a, c, g, or t
cttggctttatatatcttgtggaaaggacgaaacaccgtaatttctactaagtgtagatgtcgccccagcatcctgaagtaatttctactaagtgtagatgcgcgtcaacgtaatgtgcctaatttctactaagtgtagatttttttnnnnnnnnnnaagcttggcgtggatccgatatcaactagatcttgagacaaatggcagtattcatccacaattttaaaagaaaaggggggattggggggtacagtgcaggggaaagaatagtagacataatagcaacagacatacaaactaaag

SEQ ID NO: 18566 - DNA, 301 bp, Artificial Sequence
  Notch1.2_NTC.23
  crRNA array
  misc_feature (148)..(157): n is a, c, g, or t
cttggctttatatatcttgtggaaaggacgaaacaccgtaatttctactaagtgtagatgtcgccccagcatcctgaagtaatttctactaagtgtagatacgcgctattatcgtaggtgtaatttctactaagtgtagatttttttnnnnnnnnnnaagcttggcgtggatccgatatcaactagatcttgagacaaatggcagtattcatccacaattttaaaagaaaaggggggattggggggtacagtgcaggggaaagaatagtagacataatagcaacagacatacaaactaaag

SEQ ID NO: 18567 - DNA, 301 bp, Artificial Sequence
  Notch1.2_NTC.24
  crRNA array
  misc_feature (148)..(157): n is a, c, g, or t
cttggctttatatatcttgtggaaaggacgaaacaccgtaatttctactaagtgtagatgtcgccccagcatcctgaagtaatttctactaagtgtagatactatcgacgttcgtcccggtaatttctactaagtgtagatttttttnnnnnnnnnnaagcttggcgtggatccgatatcaactagatcttgagacaaatggcagtattcatccacaattttaaaagaaaaggggggattggggggtacagtgcaggggaaagaatagtagacataatagcaacagacatacaaactaaag

SEQ ID NO: 18568 - DNA, 301 bp, Artificial Sequence
  Notch1.2_NTC.25
  crRNA array
  misc_feature (148)..(157): n is a, c, g, or t
cttggctttatatatcttgtggaaaggacgaaacaccgtaatttctactaagtgtagatgtcgccccagcatcctgaagtaatttctactaagtgtagattcgcgttatcgtgccgtgcgtaatttctactaagtgtagatttttttnnnnnnnnnnaagcttggcgtggatccgatatcaactagatcttgagacaaatggcagtattcatccacaattttaaaagaaaaggggggattggggggtacagtgcaggggaaagaatagtagacataatagcaacagacatacaaactaaag

SEQ ID NO: 18569 - DNA, 301 bp, Artificial Sequence
  Notch1.2_NTC.26
  crRNA array
  misc_feature (148)..(157): n is a, c, g, or t
cttggctttatatatcttgtggaaaggacgaaacaccgtaatttctactaagtgtagatgtcgccccagcatcctgaagtaatttctactaagtgtagatcgcgacggcggttttaacactaatttctactaagtgtagatttttttnnnnnnnnnnaagcttggcgtggatccgatatcaactagatcttgagacaaatggcagtattcatccacaattttaaaagaaaaggggggattggggggtacagtgcaggggaaagaatagtagacataatagcaacagacatacaaactaaag

SEQ ID NO: 18570 - DNA, 301 bp, Artificial Sequence
  Notch1.2_NTC.27
  crRNA array
  misc_feature (148)..(157): n is a, c, g, or t
cttggctttatatatcttgtggaaaggacgaaacaccgtaatttctactaagtgtagatgtcgccccagcatcctgaagtaatttctactaagtgtagatgtcgcgttgcgaccggcgcttaatttctactaagtgtagatttttttnnnnnnnnnnaagcttggcgtggatccgatatcaactagatcttgagacaaatggcagtattcatccacaattttaaaagaaaaggggggattggggggtacagtgcaggggaaagaatagtagacataatagcaacagacatacaaactaaag

SEQ ID NO: 18571 - DNA, 301 bp, Artificial Sequence
  Notch1.2_NTC.28
  crRNA array
  misc_feature (148)..(157): n is a, c, g, or t
cttggctttatatatcttgtggaaaggacgaaacaccgtaatttctactaagtgtagatgtcgccccagcatcctgaagtaatttctactaagtgtagataccgctaatcggcgtaaacttaatttctactaagtgtagatttttttnnnnnnnnnnaagcttggcgtggatccgatatcaactagatcttgagacaaatggcagtattcatccacaattttaaaagaaaaggggggattggggggtacagtgcaggggaaagaatagtagacataatagcaacagacatacaaactaaag

SEQ ID NO: 18572 - DNA, 301 bp, Artificial Sequence
  Notch1.2_NTC.29
  crRNA array
  misc_feature (148)..(157): n is a, c, g, or t
cttggctttatatatcttgtggaaaggacgaaacaccgtaatttctactaagtgtagatgtcgccccagcatcctgaagtaatttctactaagtgtagatcgcgatctataccgtctatataatttctactaagtgtagatttttttnnnnnnnnnnaagcttggcgtggatccgatatcaactagatcttgagacaaatggcagtattcatccacaattttaaaagaaaaggggggattggggggtacagtgcaggggaaagaatagtagacataatagcaacagacatacaaactaaag

SEQ ID NO: 18573 - DNA, 301 bp, Artificial Sequence
  Notch1.2_NTC.3
  crRNA array
  misc_feature (148)..(157): n is a, c, g, or t
cttggctttatatatcttgtggaaaggacgaaacaccgtaatttctactaagtgtagatgtcgccccagcatcctgaagtaatttctactaagtgtagattcgacgcgagacgacgtacataatttctactaagtgtagatttttttnnnnnnnnnnaagcttggcgtggatccgatatcaactagatcttgagacaaatggcagtattcatccacaattttaaaagaaaaggggggattggggggtacagtgcaggggaaagaatagtagacataatagcaacagacatacaaactaaag

SEQ ID NO: 18574 - DNA, 301 bp, Artificial Sequence
  Notch1.2_NTC.30
  crRNA array
  misc_feature (148)..(157): n is a, c, g, or t
cttggctttatatatcttgtggaaaggacgaaacaccgtaatttctactaagtgtagatgtcgccccagcatcctgaagtaatttctactaagtgtagatcgatcgtacgggtgtcctaataatttctactaagtgtagatttttttnnnnnnnnnnaagcttggcgtggatccgatatcaactagatcttgagacaaatggcagtattcatccacaattttaaaagaaaaggggggattggggggtacagtgcaggggaaagaatagtagacataatagcaacagacatacaaactaaag

SEQ ID NO: 18575 - DNA, 301 bp, Artificial Sequence
  Notch1.2_NTC.31
  crRNA array
  misc_feature (148)..(157): n is a, c, g, or t
cttggctttatatatcttgtggaaaggacgaaacaccgtaatttctactaagtgtagatgtcgccccagcatcctgaagtaatttctactaagtgtagatgccgaccgcgtgattgtaggtaatttctactaagtgtagatttttttnnnnnnnnnnaagcttggcgtggatccgatatcaactagatcttgagacaaatggcagtattcatccacaattttaaaagaaaaggggggattggggggtacagtgcaggggaaagaatagtagacataatagcaacagacatacaaactaaag

SEQ ID NO: 18576 - DNA, 301 bp, Artificial Sequence
  Notch1.2_NTC.32
  crRNA array
  misc_feature (148)..(157): n is a, c, g, or t
cttggctttatatatcttgtggaaaggacgaaacaccgtaatttctactaagtgtagatgtcgccccagcatcctgaagtaatttctactaagtgtagatgcacgttacgcccgggtcactaatttctactaagtgtagatttttttnnnnnnnnnnaagcttggcgtggatccgatatcaactagatcttgagacaaatggcagtattcatccacaattttaaaagaaaaggggggattggggggtacagtgcaggggaaagaatagtagacataatagcaacagacatacaaactaaag

SEQ ID NO: 18577 - DNA, 301 bp, Artificial Sequence
  Notch1.2_NTC.33
  crRNA array
  misc_feature (148)..(157): n is a, c, g, or t
cttggctttatatatcttgtggaaaggacgaaacaccgtaatttctactaagtgtagatgtcgccccagcatcctgaagtaatttctactaagtgtagattaagcgaccgacgcattcgctaatttctactaagtgtagatttttttnnnnnnnnnnaagcttggcgtggatccgatatcaactagatcttgagacaaatggcagtattcatccacaattttaaaagaaaaggggggattggggggtacagtgcaggggaaagaatagtagacataatagcaacagacatacaaactaaag

SEQ ID NO: 18578 - DNA, 301 bp, Artificial Sequence
  Notch1.2_NTC.34
  crRNA array
  misc_feature (148)..(157): n is a, c, g, or t
cttggctttatatatcttgtggaaaggacgaaacaccgtaatttctactaagtgtagatgtcgccccagcatcctgaagtaatttctactaagtgtagattagcgttcgacacgtgaaactaatttctactaagtgtagatttttttnnnnnnnnnnaagcttggcgtggatccgatatcaactagatcttgagacaaatggcagtattcatccacaattttaaaagaaaaggggggattggggggtacagtgcaggggaaagaatagtagacataatagcaacagacatacaaactaaag

SEQ ID NO: 18579 - DNA, 301 bp, Artificial Sequence
  Notch1.2_NTC.35
  crRNA array
  misc_feature (148)..(157): n is a, c, g, or t
cttggctttatatatcttgtggaaaggacgaaacaccgtaatttctactaagtgtagatgtcgccccagcatcctgaagtaatttctactaagtgtagattggcgcgtaatcgctattcgtaatttctactaagtgtagatttttttnnnnnnnnnnaagcttggcgtggatccgatatcaactagatcttgagacaaatggcagtattcatccacaattttaaaagaaaaggggggattggggggtacagtgcaggggaaagaatagtagacataatagcaacagacatacaaactaaag

SEQ ID NO: 18580 - DNA, 301 bp, Artificial Sequence
  Notch1.2_NTC.36
  crRNA array
  misc_feature (148)..(157): n is a, c, g, or t
cttggctttatatatcttgtggaaaggacgaaacaccgtaatttctactaagtgtagatgtcgccccagcatcctgaagtaatttctactaagtgtagatcaacccgccgtagcgggccttaatttctactaagtgtagatttttttnnnnnnnnnnaagcttggcgtggatccgatatcaactagatcttgagacaaatggcagtattcatccacaattttaaaagaaaaggggggattggggggtacagtgcaggggaaagaatagtagacataatagcaacagacatacaaactaaag

SEQ ID NO: 18581 - DNA, 301 bp, Artificial Sequence
  Notch1.2_NTC.37
  crRNA array
  misc_feature (148)..(157): n is a, c, g, or t
cttggctttatatatcttgtggaaaggacgaaacaccgtaatttctactaagtgtagatgtcgccccagcatcctgaagtaatttctactaagtgtagattttgcgttgacgcgattacttaatttctactaagtgtagatttttttnnnnnnnnnnaagcttggcgtggatccgatatcaactagatcttgagacaaatggcagtattcatccacaattttaaaagaaaaggggggattggggggtacagtgcaggggaaagaatagtagacataatagcaacagacatacaaactaaag

SEQ ID NO: 18582 - DNA, 301 bp, Artificial Sequence
  Notch1.2_NTC.38
  crRNA array
  misc_feature (148)..(157): n is a, c, g, or t
cttggctttatatatcttgtggaaaggacgaaacaccgtaatttctactaagtgtagatgtcgccccagcatcctgaagtaatttctactaagtgtagataacggagcgcgatactaccataatttctactaagtgtagatttttttnnnnnnnnnnaagcttggcgtggatccgatatcaactagatcttgagacaaatggcagtattcatccacaattttaaaagaaaaggggggattggggggtacagtgcaggggaaagaatagtagacataatagcaacagacatacaaactaaag

SEQ ID NO: 18583 - DNA, 301 bp, Artificial Sequence
  Notch1.2_NTC.39
  crRNA array
  misc_feature (148)..(157): n is a, c, g, or t
cttggctttatatatcttgtggaaaggacgaaacaccgtaatttctactaagtgtagatgtcgccccagcatcctgaagtaatttctactaagtgtagatccggacgttataacgtttcttaatttctactaagtgtagatttttttnnnnnnnnnnaagcttggcgtggatccgatatcaactagatcttgagacaaatggcagtattcatccacaattttaaaagaaaaggggggattggggggtacagtgcaggggaaagaatagtagacataatagcaacagacatacaaactaaag

SEQ ID NO: 18584 - DNA, 301 bp, Artificial Sequence
  Notch1.2_NTC.4
  crRNA array
  misc_feature (148)..(157): n is a, c, g, or t
cttggctttatatatcttgtggaaaggacgaaacaccgtaatttctactaagtgtagatgtcgccccagcatcctgaagtaatttctactaagtgtagatatacccgtcgcgaacgtgagtaatttctactaagtgtagatttttttnnnnnnnnnnaagcttggcgtggatccgatatcaactagatcttgagacaaatggcagtattcatccacaattttaaaagaaaaggggggattggggggtacagtgcaggggaaagaatagtagacataatagcaacagacatacaaactaaag

SEQ ID NO: 18585 - DNA, 301 bp, Artificial Sequence
  Notch1.2_NTC.40
  crRNA array
  misc_feature (148)..(157): n is a, c, g, or t
cttggctttatatatcttgtggaaaggacgaaacaccgtaatttctactaagtgtagatgtcgccccagcatcctgaagtaatttctactaagtgtagatattcgcgaacccggccggaataatttctactaagtgtagatttttttnnnnnnnnnnaagcttggcgtggatccgatatcaactagatcttgagacaaatggcagtattcatccacaattttaaaagaaaaggggggattggggggtacagtgcaggggaaagaatagtagacataatagcaacagacatacaaactaaag

SEQ ID NO: 18586 - DNA, 301 bp, Artificial Sequence
  Notch1.2_NTC.41
  crRNA array
  misc_feature (148)..(157): n is a, c, g, or t
cttggctttatatatcttgtggaaaggacgaaacaccgtaatttctactaagtgtagatgtcgccccagcatcctgaagtaatttctactaagtgtagatttgatggcgcgacgcgttattaatttctactaagtgtagatttttttnnnnnnnnnnaagcttggcgtggatccgatatcaactagatcttgagacaaatggcagtattcatccacaattttaaaagaaaaggggggattggggggtacagtgcaggggaaagaatagtagacataatagcaacagacatacaaactaaag

SEQ ID NO: 18587 - DNA, 301 bp, Artificial Sequence
  Notch1.2_NTC.42
  crRNA array
  misc_feature (148)..(157): n is a, c, g, or t
cttggctttatatatcttgtggaaaggacgaaacaccgtaatttctactaagtgtagatgtcgccccagcatcctgaagtaatttctactaagtgtagatggtcaaatcgcggcgataactaatttctactaagtgtagatttttttnnnnnnnnnnaagcttggcgtggatccgatatcaactagatcttgagacaaatggcagtattcatccacaattttaaaagaaaaggggggattggggggtacagtgcaggggaaagaatagtagacataatagcaacagacatacaaactaaag

SEQ ID NO: 18588 - DNA, 301 bp, Artificial Sequence
  Notch1.2_NTC.43
  crRNA array
  misc_feature (148)..(157): n is a, c, g, or t
cttggctttatatatcttgtggaaaggacgaaacaccgtaatttctactaagtgtagatgtcgccccagcatcctgaagtaatttctactaagtgtagatcgactcgcgcattgaactggtaatttctactaagtgtagatttttttnnnnnnnnnnaagcttggcgtggatccgatatcaactagatcttgagacaaatggcagtattcatccacaattttaaaagaaaaggggggattggggggtacagtgcaggggaaagaatagtagacataatagcaacagacatacaaactaaag

SEQ ID NO: 18589 - DNA, 301 bp, Artificial Sequence
  Notch1.2_NTC.44
  crRNA array
  misc_feature (148)..(157): n is a, c, g, or t
cttggctttatatatcttgtggaaaggacgaaacaccgtaatttctactaagtgtagatgtcgccccagcatcctgaagtaatttctactaagtgtagatagcgtcgtacgatttatcgttaatttctactaagtgtagatttttttnnnnnnnnnnaagcttggcgtggatccgatatcaactagatcttgagacaaatggcagtattcatccacaattttaaaagaaaaggggggattggggggtacagtgcaggggaaagaatagtagacataatagcaacagacatacaaactaaag

SEQ ID NO: 18590 - DNA, 301 bp, Artificial Sequence
  Notch1.2_NTC.45
  crRNA array
  misc_feature (148)..(157): n is a, c, g, or t
cttggctttatatatcttgtggaaaggacgaaacaccgtaatttctactaagtgtagatgtcgccccagcatcctgaagtaatttctactaagtgtagatcggaacgcgtgatactagggtaatttctactaagtgtagatttttttnnnnnnnnnnaagcttggcgtggatccgatatcaactagatcttgagacaaatggcagtattcatccacaattttaaaagaaaaggggggattggggggtacagtgcaggggaaagaatagtagacataatagcaacagacatacaaactaaag

SEQ ID NO: 18591 - DNA, 301 bp, Artificial Sequence
  Notch1.2_NTC.46
  crRNA array
  misc_feature (148)..(157): n is a, c, g, or t
cttggctttatatatcttgtggaaaggacgaaacaccgtaatttctactaagtgtagatgtcgccccagcatcctgaagtaatttctactaagtgtagatagcgggtcgtagacgcgcggtaatttctactaagtgtagatttttttnnnnnnnnnnaagcttggcgtggatccgatatcaactagatcttgagacaaatggcagtattcatccacaattttaaaagaaaaggggggattggggggtacagtgcaggggaaagaatagtagacataatagcaacagacatacaaactaaag

SEQ ID NO: 18592 - DNA, 301 bp, Artificial Sequence
  Notch1.2_NTC.47
  crRNA array
  misc_feature (148)..(157): n is a, c, g, or t
cttggctttatatatcttgtggaaaggacgaaacaccgtaatttctactaagtgtagatgtcgccccagcatcctgaagtaatttctactaagtgtagattctcgtatcgcgattgttaataatttctactaagtgtagatttttttnnnnnnnnnnaagcttggcgtggatccgatatcaactagatcttgagacaaatggcagtattcatccacaattttaaaagaaaaggggggattggggggtacagtgcaggggaaagaatagtagacataatagcaacagacatacaaactaaag

SEQ ID NO: 18593 - DNA, 301 bp, Artificial Sequence
  Notch1.2_NTC.48
  crRNA array
  misc_feature (148)..(157): n is a, c, g, or t
cttggctttatatatcttgtggaaaggacgaaacaccgtaatttctactaagtgtagatgtcgccccagcatcctgaagtaatttctactaagtgtagatcggtcgactacggctgttagtaatttctactaagtgtagatttttttnnnnnnnnnnaagcttggcgtggatccgatatcaactagatcttgagacaaatggcagtattcatccacaattttaaaagaaaaggggggattggggggtacagtgcaggggaaagaatagtagacataatagcaacagacatacaaactaaag

SEQ ID NO: 18594 - DNA, 301 bp, Artificial Sequence
  Notch1.2_NTC.49
  crRNA array
  misc_feature (148)..(157): n is a, c, g, or t
cttggctttatatatcttgtggaaaggacgaaacaccgtaatttctactaagtgtagatgtcgccccagcatcctgaagtaatttctactaagtgtagattcggggcgcgtcaactgaattaatttctactaagtgtagatttttttnnnnnnnnnnaagcttggcgtggatccgatatcaactagatcttgagacaaatggcagtattcatccacaattttaaaagaaaaggggggattggggggtacagtgcaggggaaagaatagtagacataatagcaacagacatacaaactaaag

SEQ ID NO: 18595 - DNA, 301 bp, Artificial Sequence
  Notch1.2_NTC.5
  crRNA array
  misc_feature (148)..(157): n is a, c, g, or t
cttggctttatatatcttgtggaaaggacgaaacaccgtaatttctactaagtgtagatgtcgccccagcatcctgaagtaatttctactaagtgtagatgcttacgcgtcgcgaatgtataatttctactaagtgtagatttttttnnnnnnnnnnaagcttggcgtggatccgatatcaactagatcttgagacaaatggcagtattcatccacaattttaaaagaaaaggggggattggggggtacagtgcaggggaaagaatagtagacataatagcaacagacatacaaactaaag

SEQ ID NO: 18596 - DNA, 301 bp, Artificial Sequence
  Notch1.2_NTC.50
  crRNA array
  misc_feature (148)..(157): n is a, c, g, or t
cttggctttatatatcttgtggaaaggacgaaacaccgtaatttctactaagtgtagatgtcgccccagcatcctgaagtaatttctactaagtgtagatattgccgctcgcgcaaaatctaatttctactaagtgtagatttttttnnnnnnnnnnaagcttggcgtggatccgatatcaactagatcttgagacaaatggcagtattcatccacaattttaaaagaaaaggggggattggggggtacagtgcaggggaaagaatagtagacataatagcaacagacatacaaactaaag

SEQ ID NO: 18597 - DNA, 301 bp, Artificial Sequence
  Notch1.2_NTC.51
  crRNA array
  misc_feature (148)..(157): n is a, c, g, or t
cttggctttatatatcttgtggaaaggacgaaacaccgtaatttctactaagtgtagatgtcgccccagcatcctgaagtaatttctactaagtgtagattaacgcgcaacacgccaatgtaatttctactaagtgtagatttttttnnnnnnnnnnaagcttggcgtggatccgatatcaactagatcttgagacaaatggcagtattcatccacaattttaaaagaaaaggggggattggggggtacagtgcaggggaaagaatagtagacataatagcaacagacatacaaactaaag

SEQ ID NO: 18598 - DNA, 301 bp, Artificial Sequence
  Notch1.2_NTC.6
  crRNA array
  misc_feature (148)..(157): n is a, c, g, or t
cttggctttatatatcttgtggaaaggacgaaacaccgtaatttctactaagtgtagatgtcgccccagcatcctgaagtaatttctactaagtgtagatcgaatcgcgcctacgggaattaatttctactaagtgtagatttttttnnnnnnnnnnaagcttggcgtggatccgatatcaactagatcttgagacaaatggcagtattcatccacaattttaaaagaaaaggggggattggggggtacagtgcaggggaaagaatagtagacataatagcaacagacatacaaactaaag

SEQ ID NO: 18599 - DNA, 301 bp, Artificial Sequence
  Notch1.2_NTC.7
  crRNA array
  misc_feature (148)..(157): n is a, c, g, or t
cttggctttatatatcttgtggaaaggacgaaacaccgtaatttctactaagtgtagatgtcgccccagcatcctgaagtaatttctactaagtgtagatcgccgaacggataagactattaatttctactaagtgtagatttttttnnnnnnnnnnaagcttggcgtggatccgatatcaactagatcttgagacaaatggcagtattcatccacaattttaaaagaaaaggggggattggggggtacagtgcaggggaaagaatagtagacataatagcaacagacatacaaactaaag

SEQ ID NO: 18600 - DNA, 301 bp, Artificial Sequence
  Notch1.2_NTC.8
  crRNA array
  misc_feature (148)..(157): n is a, c, g, or t
cttggctttatatatcttgtggaaaggacgaaacaccgtaatttctactaagtgtagatgtcgccccagcatcctgaagtaatttctactaagtgtagatcgaccgaggttacgctgggataatttctactaagtgtagatttttttnnnnnnnnnnaagcttggcgtggatccgatatcaactagatcttgagacaaatggcagtattcatccacaattttaaaagaaaaggggggattggggggtacagtgcaggggaaagaatagtagacataatagcaacagacatacaaactaaag

SEQ ID NO: 18601 - DNA, 301 bp, Artificial Sequence
  Notch1.2_NTC.9
  crRNA array
  misc_feature (148)..(157): n is a, c, g, or t
cttggctttatatatcttgtggaaaggacgaaacaccgtaatttctactaagtgtagatgtcgccccagcatcctgaagtaatttctactaagtgtagatatcgccgtacggctatggcataatttctactaagtgtagatttttttnnnnnnnnnnaagcttggcgtggatccgatatcaactagatcttgagacaaatggcagtattcatccacaattttaaaagaaaaggggggattggggggtacagtgcaggggaaagaatagtagacataatagcaacagacatacaaactaaag

SEQ ID NO: 18602 - DNA, 301 bp, Artificial Sequence
  Notch1.3_NTC.0
  crRNA array
  misc_feature (148)..(157): n is a, c, g, or t
cttggctttatatatcttgtggaaaggacgaaacaccgtaatttctactaagtgtagatagccacccccgccacgcctctaatttctactaagtgtagattatagcgtcgcgcgctaatttaatttctactaagtgtagatttttttnnnnnnnnnnaagcttggcgtggatccgatatcaactagatcttgagacaaatggcagtattcatccacaattttaaaagaaaaggggggattggggggtacagtgcaggggaaagaatagtagacataatagcaacagacatacaaactaaag

SEQ ID NO: 18603 - DNA, 301 bp, Artificial Sequence
  Notch1.3_NTC.1
  crRNA array
  misc_feature (148)..(157): n is a, c, g, or t
cttggctttatatatcttgtggaaaggacgaaacaccgtaatttctactaagtgtagatagccacccccgccacgcctctaatttctactaagtgtagatcgcgtaaccgttccggctcctaatttctactaagtgtagatttttttnnnnnnnnnnaagcttggcgtggatccgatatcaactagatcttgagacaaatggcagtattcatccacaattttaaaagaaaaggggggattggggggtacagtgcaggggaaagaatagtagacataatagcaacagacatacaaactaaag

SEQ ID NO: 18604 - DNA, 301 bp, Artificial Sequence
  Notch1.3_NTC.10
  crRNA array
  misc_feature (148)..(157): n is a, c, g, or t
cttggctttatatatcttgtggaaaggacgaaacaccgtaatttctactaagtgtagatagccacccccgccacgcctctaatttctactaagtgtagatcgctaagttcgcgcgggccgtaatttctactaagtgtagatttttttnnnnnnnnnnaagcttggcgtggatccgatatcaactagatcttgagacaaatggcagtattcatccacaattttaaaagaaaaggggggattggggggtacagtgcaggggaaagaatagtagacataatagcaacagacatacaaactaaag

SEQ ID NO: 18605 - DNA, 301 bp, Artificial Sequence
  Notch1.3_NTC.11
  crRNA array
  misc_feature (148)..(157): n is a, c, g, or t
cttggctttatatatcttgtggaaaggacgaaacaccgtaatttctactaagtgtagatagccacccccgccacgcctctaatttctactaagtgtagatcgttcgtcgacgaagcaatctaatttctactaagtgtagatttttttnnnnnnnnnnaagcttggcgtggatccgatatcaactagatcttgagacaaatggcagtattcatccacaattttaaaagaaaaggggggattggggggtacagtgcaggggaaagaatagtagacataatagcaacagacatacaaactaaag

SEQ ID NO: 18606 - DNA, 301 bp, Artificial Sequence
  Notch1.3_NTC.12
  crRNA array
  misc_feature (148)..(157): n is a, c, g, or t
cttggctttatatatcttgtggaaaggacgaaacaccgtaatttctactaagtgtagatagccacccccgccacgcctctaatttctactaagtgtagatcgccgacgattaatcaatagtaatttctactaagtgtagatttttttnnnnnnnnnnaagcttggcgtggatccgatatcaactagatcttgagacaaatggcagtattcatccacaattttaaaagaaaaggggggattggggggtacagtgcaggggaaagaatagtagacataatagcaacagacatacaaactaaag

SEQ ID NO: 18607 - DNA, 301 bp, Artificial Sequence
  Notch1.3_NTC.13
  crRNA array
  misc_feature (148)..(157): n is a, c, g, or t
cttggctttatatatcttgtggaaaggacgaaacaccgtaatttctactaagtgtagatagccacccccgccacgcctctaatttctactaagtgtagatgaccgttgtatcgcgatcaataatttctactaagtgtagatttttttnnnnnnnnnnaagcttggcgtggatccgatatcaactagatcttgagacaaatggcagtattcatccacaattttaaaagaaaaggggggattggggggtacagtgcaggggaaagaatagtagacataatagcaacagacatacaaactaaag

SEQ ID NO: 18608 - DNA, 301 bp, Artificial Sequence
  Notch1.3_NTC.14
  crRNA array
  misc_feature (148)..(157): n is a, c, g, or t
cttggctttatatatcttgtggaaaggacgaaacaccgtaatttctactaagtgtagatagccacccccgccacgcctctaatttctactaagtgtagatccgttcgtgcgatagtgttttaatttctactaagtgtagatttttttnnnnnnnnnnaagcttggcgtggatccgatatcaactagatcttgagacaaatggcagtattcatccacaattttaaaagaaaaggggggattggggggtacagtgcaggggaaagaatagtagacataatagcaacagacatacaaactaaag

SEQ ID NO: 18609 - DNA, 301 bp, Artificial Sequence
  Notch1.3_NTC.15
  crRNA array
  misc_feature (148)..(157): n is a, c, g, or t
cttggctttatatatcttgtggaaaggacgaaacaccgtaatttctactaagtgtagatagccacccccgccacgcctctaatttctactaagtgtagatgttgtcgtgccgcgaatttataatttctactaagtgtagatttttttnnnnnnnnnnaagcttggcgtggatccgatatcaactagatcttgagacaaatggcagtattcatccacaattttaaaagaaaaggggggattggggggtacagtgcaggggaaagaatagtagacataatagcaacagacatacaaactaaag

SEQ ID NO: 18610 - DNA, 301 bp, Artificial Sequence
  Notch1.3_NTC.16
  crRNA array
  misc_feature (148)..(157): n is a, c, g, or t
cttggctttatatatcttgtggaaaggacgaaacaccgtaatttctactaagtgtagatagccacccccgccacgcctctaatttctactaagtgtagatcggtacgttagacgaaaatttaatttctactaagtgtagatttttttnnnnnnnnnnaagcttggcgtggatccgatatcaactagatcttgagacaaatggcagtattcatccacaattttaaaagaaaaggggggattggggggtacagtgcaggggaaagaatagtagacataatagcaacagacatacaaactaaag

SEQ ID NO: 18611 - DNA, 301 bp, Artificial Sequence
  Notch1.3_NTC.17
  crRNA array
  misc_feature (148)..(157): n is a, c, g, or t
cttggctttatatatcttgtggaaaggacgaaacaccgtaatttctactaagtgtagatagccacccccgccacgcctctaatttctactaagtgtagattatcgaacgctatcgaacgttaatttctactaagtgtagatttttttnnnnnnnnnnaagcttggcgtggatccgatatcaactagatcttgagacaaatggcagtattcatccacaattttaaaagaaaaggggggattggggggtacagtgcaggggaaagaatagtagacataatagcaacagacatacaaactaaag

SEQ ID NO: 18612 - DNA, 301 bp, Artificial Sequence
  Notch1.3_NTC.18
  crRNA array
  misc_feature (148)..(157): n is a, c, g, or t
cttggctttatatatcttgtggaaaggacgaaacaccgtaatttctactaagtgtagatagccacccccgccacgcctctaatttctactaagtgtagattccggttacgaccggcaaaataatttctactaagtgtagatttttttnnnnnnnnnnaagcttggcgtggatccgatatcaactagatcttgagacaaatggcagtattcatccacaattttaaaagaaaaggggggattggggggtacagtgcaggggaaagaatagtagacataatagcaacagacatacaaactaaag

SEQ ID NO: 18613 - DNA, 301 bp, Artificial Sequence
  Notch1.3_NTC.19
  crRNA array
  misc_feature (148)..(157): n is a, c, g, or t
cttggctttatatatcttgtggaaaggacgaaacaccgtaatttctactaagtgtagatagccacccccgccacgcctctaatttctactaagtgtagatcgtcgtagaacgatacccgataatttctactaagtgtagatttttttnnnnnnnnnnaagcttggcgtggatccgatatcaactagatcttgagacaaatggcagtattcatccacaattttaaaagaaaaggggggattggggggtacagtgcaggggaaagaatagtagacataatagcaacagacatacaaactaaag

SEQ ID NO: 18614 - DNA, 301 bp, Artificial Sequence
  Notch1.3_NTC.2
  crRNA array
  misc_feature (148)..(157): n is a, c, g, or t
cttggctttatatatcttgtggaaaggacgaaacaccgtaatttctactaagtgtagatagccacccccgccacgcctctaatttctactaagtgtagatttatgtcgcgccgcgacccgtaatttctactaagtgtagatttttttnnnnnnnnnnaagcttggcgtggatccgatatcaactagatcttgagacaaatggcagtattcatccacaattttaaaagaaaaggggggattggggggtacagtgcaggggaaagaatagtagacataatagcaacagacatacaaactaaag

SEQ ID NO: 18615 - DNA, 301 bp, Artificial Sequence
  Notch1.3_NTC.20
  crRNA array
  misc_feature (148)..(157): n is a, c, g, or t
cttggctttatatatcttgtggaaaggacgaaacaccgtaatttctactaagtgtagatagccacccccgccacgcctctaatttctactaagtgtagatattccggcgcgaccagaagataatttctactaagtgtagatttttttnnnnnnnnnnaagcttggcgtggatccgatatcaactagatcttgagacaaatggcagtattcatccacaattttaaaagaaaaggggggattggggggtacagtgcaggggaaagaatagtagacataatagcaacagacatacaaactaaag

SEQ ID NO: 18616 - DNA, 301 bp, Artificial Sequence
  Notch1.3_NTC.21
  crRNA array
  misc_feature (148)..(157): n is a, c, g, or t
cttggctttatatatcttgtggaaaggacgaaacaccgtaatttctactaagtgtagatagccacccccgccacgcctctaatttctactaagtgtagatgtataacttcgcgcggtccgtaatttctactaagtgtagatttttttnnnnnnnnnnaagcttggcgtggatccgatatcaactagatcttgagacaaatggcagtattcatccacaattttaaaagaaaaggggggattggggggtacagtgcaggggaaagaatagtagacataatagcaacagacatacaaactaaag

SEQ ID NO: 18617 - DNA, 301 bp, Artificial Sequence
  Notch1.3_NTC.22
  crRNA array
  misc_feature (148)..(157): n is a, c, g, or t
cttggctttatatatcttgtggaaaggacgaaacaccgtaatttctactaagtgtagatagccacccccgccacgcctctaatttctactaagtgtagatgcgcgtcaacgtaatgtgcctaatttctactaagtgtagatttttttnnnnnnnnnnaagcttggcgtggatccgatatcaactagatcttgagacaaatggcagtattcatccacaattttaaaagaaaaggggggattggggggtacagtgcaggggaaagaatagtagacataatagcaacagacatacaaactaaag

SEQ ID NO: 18618 - DNA, 301 bp, Artificial Sequence
  Notch1.3_NTC.23
  crRNA array
  misc_feature (148)..(157): n is a, c, g, or t
cttggctttatatatcttgtggaaaggacgaaacaccgtaatttctactaagtgtagatagccacccccgccacgcctctaatttctactaagtgtagatacgcgctattatcgtaggtgtaatttctactaagtgtagatttttttnnnnnnnnnnaagcttggcgtggatccgatatcaactagatcttgagacaaatggcagtattcatccacaattttaaaagaaaaggggggattggggggtacagtgcaggggaaagaatagtagacataatagcaacagacatacaaactaaag

SEQ ID NO: 18619 - DNA, 301 bp, Artificial Sequence
  Notch1.3_NTC.24
  crRNA array
  misc_feature (148)..(157): n is a, c, g, or t
cttggctttatatatcttgtggaaaggacgaaacaccgtaatttctactaagtgtagatagccacccccgccacgcctctaatttctactaagtgtagatactatcgacgttcgtcccggtaatttctactaagtgtagatttttttnnnnnnnnnnaagcttggcgtggatccgatatcaactagatcttgagacaaatggcagtattcatccacaattttaaaagaaaaggggggattggggggtacagtgcaggggaaagaatagtagacataatagcaacagacatacaaactaaag

SEQ ID NO: 18620 - DNA, 301 bp, Artificial Sequence
  Notch1.3_NTC.25
  crRNA array
  misc_feature (148)..(157): n is a, c, g, or t
cttggctttatatatcttgtggaaaggacgaaacaccgtaatttctactaagtgtagatagccacccccgccacgcctctaatttctactaagtgtagattcgcgttatcgtgccgtgcgtaatttctactaagtgtagatttttttnnnnnnnnnnaagcttggcgtggatccgatatcaactagatcttgagacaaatggcagtattcatccacaattttaaaagaaaaggggggattggggggtacagtgcaggggaaagaatagtagacataatagcaacagacatacaaactaaag

SEQ ID NO: 18621 - DNA, 301 bp, Artificial Sequence
  Notch1.3_NTC.26
  crRNA array
  misc_feature (148)..(157): n is a, c, g, or t
cttggctttatatatcttgtggaaaggacgaaacaccgtaatttctactaagtgtagatagccacccccgccacgcctctaatttctactaagtgtagatcgcgacggcggttttaacactaatttctactaagtgtagatttttttnnnnnnnnnnaagcttggcgtggatccgatatcaactagatcttgagacaaatggcagtattcatccacaattttaaaagaaaaggggggattggggggtacagtgcaggggaaagaatagtagacataatagcaacagacatacaaactaaag

SEQ ID NO: 18622 - DNA, 301 bp, Artificial Sequence
  Notch1.3_NTC.27
  crRNA array
  misc_feature (148)..(157): n is a, c, g, or t
cttggctttatatatcttgtggaaaggacgaaacaccgtaatttctactaagtgtagatagccacccccgccacgcctctaatttctactaagtgtagatgtcgcgttgcgaccggcgcttaatttctactaagtgtagatttttttnnnnnnnnnnaagcttggcgtggatccgatatcaactagatcttgagacaaatggcagtattcatccacaattttaaaagaaaaggggggattggggggtacagtgcaggggaaagaatagtagacataatagcaacagacatacaaactaaag

SEQ ID NO: 18623 - DNA, 301 bp, Artificial Sequence
  Notch1.3_NTC.28
  crRNA array
  misc_feature (148)..(157): n is a, c, g, or t
cttggctttatatatcttgtggaaaggacgaaacaccgtaatttctactaagtgtagatagccacccccgccacgcctctaatttctactaagtgtagataccgctaatcggcgtaaacttaatttctactaagtgtagatttttttnnnnnnnnnnaagcttggcgtggatccgatatcaactagatcttgagacaaatggcagtattcatccacaattttaaaagaaaaggggggattggggggtacagtgcaggggaaagaatagtagacataatagcaacagacatacaaactaaag

SEQ ID NO: 18624 - DNA, 301 bp, Artificial Sequence
  Notch1.3_NTC.29
  crRNA array
  misc_feature (148)..(157): n is a, c, g, or t
cttggctttatatatcttgtggaaaggacgaaacaccgtaatttctactaagtgtagatagccacccccgccacgcctctaatttctactaagtgtagatcgcgatctataccgtctatataatttctactaagtgtagatttttttnnnnnnnnnnaagcttggcgtggatccgatatcaactagatcttgagacaaatggcagtattcatccacaattttaaaagaaaaggggggattggggggtacagtgcaggggaaagaatagtagacataatagcaacagacatacaaactaaag

SEQ ID NO: 18625 - DNA, 301 bp, Artificial Sequence
  Notch1.3_NTC.3
  crRNA array
  misc_feature (148)..(157): n is a, c, g, or t
cttggctttatatatcttgtggaaaggacgaaacaccgtaatttctactaagtgtagatagccacccccgccacgcctctaatttctactaagtgtagattcgacgcgagacgacgtacataatttctactaagtgtagatttttttnnnnnnnnnnaagcttggcgtggatccgatatcaactagatcttgagacaaatggcagtattcatccacaattttaaaagaaaaggggggattggggggtacagtgcaggggaaagaatagtagacataatagcaacagacatacaaactaaag

SEQ ID NO: 18626 - DNA, 301 bp, Artificial Sequence
  Notch1.3_NTC.30
  crRNA array
  misc_feature (148)..(157): n is a, c, g, or t
cttggctttatatatcttgtggaaaggacgaaacaccgtaatttctactaagtgtagatagccacccccgccacgcctctaatttctactaagtgtagatcgatcgtacgggtgtcctaataatttctactaagtgtagatttttttnnnnnnnnnnaagcttggcgtggatccgatatcaactagatcttgagacaaatggcagtattcatccacaattttaaaagaaaaggggggattggggggtacagtgcaggggaaagaatagtagacataatagcaacagacatacaaactaaag

SEQ ID NO: 18627 - DNA, 301 bp, Artificial Sequence
  Notch1.3_NTC.31
  crRNA array
  misc_feature (148)..(157): n is a, c, g, or t
cttggctttatatatcttgtggaaaggacgaaacaccgtaatttctactaagtgtagatagccacccccgccacgcctctaatttctactaagtgtagatgccgaccgcgtgattgtaggtaatttctactaagtgtagatttttttnnnnnnnnnnaagcttggcgtggatccgatatcaactagatcttgagacaaatggcagtattcatccacaattttaaaagaaaaggggggattggggggtacagtgcaggggaaagaatagtagacataatagcaacagacatacaaactaaag

SEQ ID NO: 18628 - DNA, 301 bp, Artificial Sequence
  Notch1.3_NTC.32
  crRNA array
  misc_feature (148)..(157): n is a, c, g, or t
cttggctttatatatcttgtggaaaggacgaaacaccgtaatttctactaagtgtagatagccacccccgccacgcctctaatttctactaagtgtagatgcacgttacgcccgggtcactaatttctactaagtgtagatttttttnnnnnnnnnnaagcttggcgtggatccgatatcaactagatcttgagacaaatggcagtattcatccacaattttaaaagaaaaggggggattggggggtacagtgcaggggaaagaatagtagacataatagcaacagacatacaaactaaag

SEQ ID NO: 18629 - DNA, 301 bp, Artificial Sequence
  Notch1.3_NTC.33
  crRNA array
  misc_feature (148)..(157): n is a, c, g, or t
cttggctttatatatcttgtggaaaggacgaaacaccgtaatttctactaagtgtagatagccacccccgccacgcctctaatttctactaagtgtagattaagcgaccgacgcattcgctaatttctactaagtgtagatttttttnnnnnnnnnnaagcttggcgtggatccgatatcaactagatcttgagacaaatggcagtattcatccacaattttaaaagaaaaggggggattggggggtacagtgcaggggaaagaatagtagacataatagcaacagacatacaaactaaag

SEQ ID NO: 18630 - DNA, 301 bp, Artificial Sequence
  Notch1.3_NTC.34
  crRNA array
  misc_feature (148)..(157): n is a, c, g, or t
cttggctttatatatcttgtggaaaggacgaaacaccgtaatttctactaagtgtagatagccacccccgccacgcctctaatttctactaagtgtagattagcgttcgacacgtgaaactaatttctactaagtgtagatttttttnnnnnnnnnnaagcttggcgtggatccgatatcaactagatcttgagacaaatggcagtattcatccacaattttaaaagaaaaggggggattggggggtacagtgcaggggaaagaatagtagacataatagcaacagacatacaaactaaag

SEQ ID NO: 18631 - DNA, 301 bp, Artificial Sequence
  Notch1.3_NTC.35
  crRNA array
  misc_feature (148)..(157): n is a, c, g, or t
cttggctttatatatcttgtggaaaggacgaaacaccgtaatttctactaagtgtagatagccacccccgccacgcctctaatttctactaagtgtagattggcgcgtaatcgctattcgtaatttctactaagtgtagatttttttnnnnnnnnnnaagcttggcgtggatccgatatcaactagatcttgagacaaatggcagtattcatccacaattttaaaagaaaaggggggattggggggtacagtgcaggggaaagaatagtagacataatagcaacagacatacaaactaaag

SEQ ID NO: 18632 - DNA, 301 bp, Artificial Sequence
  Notch1.3_NTC.36
  crRNA array
  misc_feature (148)..(157): n is a, c, g, or t
cttggctttatatatcttgtggaaaggacgaaacaccgtaatttctactaagtgtagatagccacccccgccacgcctctaatttctactaagtgtagatcaacccgccgtagcgggccttaatttctactaagtgtagatttttttnnnnnnnnnnaagcttggcgtggatccgatatcaactagatcttgagacaaatggcagtattcatccacaattttaaaagaaaaggggggattggggggtacagtgcaggggaaagaatagtagacataatagcaacagacatacaaactaaag

SEQ ID NO: 18633 - DNA, 301 bp, Artificial Sequence
  Notch1.3_NTC.37
  crRNA array
  misc_feature (148)..(157): n is a, c, g, or t
cttggctttatatatcttgtggaaaggacgaaacaccgtaatttctactaagtgtagatagccacccccgccacgcctctaatttctactaagtgtagattttgcgttgacgcgattacttaatttctactaagtgtagatttttttnnnnnnnnnnaagcttggcgtggatccgatatcaactagatcttgagacaaatggcagtattcatccacaattttaaaagaaaaggggggattggggggtacagtgcaggggaaagaatagtagacataatagcaacagacatacaaactaaag

SEQ ID NO: 18634 - DNA, 301 bp, Artificial Sequence
  Notch1.3_NTC.38
  crRNA array
  misc_feature (148)..(157): n is a, c, g, or t
cttggctttatatatcttgtggaaaggacgaaacaccgtaatttctactaagtgtagatagccacccccgccacgcctctaatttctactaagtgtagataacggagcgcgatactaccataatttctactaagtgtagatttttttnnnnnnnnnnaagcttggcgtggatccgatatcaactagatcttgagacaaatggcagtattcatccacaattttaaaagaaaaggggggattggggggtacagtgcaggggaaagaatagtagacataatagcaacagacatacaaactaaag

SEQ ID NO: 18635 - DNA, 301 bp, Artificial Sequence
  Notch1.3_NTC.39
  crRNA array
  misc_feature (148)..(157): n is a, c, g, or t
cttggctttatatatcttgtggaaaggacgaaacaccgtaatttctactaagtgtagatagccacccccgccacgcctctaatttctactaagtgtagatccggacgttataacgtttcttaatttctactaagtgtagatttttttnnnnnnnnnnaagcttggcgtggatccgatatcaactagatcttgagacaaatggcagtattcatccacaattttaaaagaaaaggggggattggggggtacagtgcaggggaaagaatagtagacataatagcaacagacatacaaactaaag

SEQ ID NO: 18636 - DNA, 301 bp, Artificial Sequence
  Notch1.3_NTC.4
  crRNA array
  misc_feature (148)..(157): n is a, c, g, or t
cttggctttatatatcttgtggaaaggacgaaacaccgtaatttctactaagtgtagatagccacccccgccacgcctctaatttctactaagtgtagatatacccgtcgcgaacgtgagtaatttctactaagtgtagatttttttnnnnnnnnnnaagcttggcgtggatccgatatcaactagatcttgagacaaatggcagtattcatccacaattttaaaagaaaaggggggattggggggtacagtgcaggggaaagaatagtagacataatagcaacagacatacaaactaaag

SEQ ID NO: 18637 - DNA, 301 bp, Artificial Sequence
  Notch1.3_NTC.40
  crRNA array
  misc_feature (148)..(157): n is a, c, g, or t
cttggctttatatatcttgtggaaaggacgaaacaccgtaatttctactaagtgtagatagccacccccgccacgcctctaatttctactaagtgtagatattcgcgaacccggccggaataatttctactaagtgtagatttttttnnnnnnnnnnaagcttggcgtggatccgatatcaactagatcttgagacaaatggcagtattcatccacaattttaaaagaaaaggggggattggggggtacagtgcaggggaaagaatagtagacataatagcaacagacatacaaactaaag

SEQ ID NO: 18638 - DNA, 301 bp, Artificial Sequence
  Notch1.3_NTC.41
  crRNA array
  misc_feature (148)..(157): n is a, c, g, or t
cttggctttatatatcttgtggaaaggacgaaacaccgtaatttctactaagtgtagatagccacccccgccacgcctctaatttctactaagtgtagatttgatggcgcgacgcgttattaatttctactaagtgtagatttttttnnnnnnnnnnaagcttggcgtggatccgatatcaactagatcttgagacaaatggcagtattcatccacaattttaaaagaaaaggggggattggggggtacagtgcaggggaaagaatagtagacataatagcaacagacatacaaactaaag

SEQ ID NO: 18639 - DNA, 301 bp, Artificial Sequence
  Notch1.3_NTC.42
  crRNA array
  misc_feature (148)..(157): n is a, c, g, or t
cttggctttatatatcttgtggaaaggacgaaacaccgtaatttctactaagtgtagatagccacccccgccacgcctctaatttctactaagtgtagatggtcaaatcgcggcgataactaatttctactaagtgtagatttttttnnnnnnnnnnaagcttggcgtggatccgatatcaactagatcttgagacaaatggcagtattcatccacaattttaaaagaaaaggggggattggggggtacagtgcaggggaaagaatagtagacataatagcaacagacatacaaactaaag

SEQ ID NO: 18640 - DNA, 301 bp, Artificial Sequence
  Notch1.3_NTC.43
  crRNA array
  misc_feature (148)..(157): n is a, c, g, or t
cttggctttatatatcttgtggaaaggacgaaacaccgtaatttctactaagtgtagatagccacccccgccacgcctctaatttctactaagtgtagatcgactcgcgcattgaactggtaatttctactaagtgtagatttttttnnnnnnnnnnaagcttggcgtggatccgatatcaactagatcttgagacaaatggcagtattcatccacaattttaaaagaaaaggggggattggggggtacagtgcaggggaaagaatagtagacataatagcaacagacatacaaactaaag

SEQ ID NO: 18641 - DNA, 301 bp, Artificial Sequence
  Notch1.3_NTC.44
  crRNA array
  misc_feature (148)..(157): n is a, c, g, or t
cttggctttatatatcttgtggaaaggacgaaacaccgtaatttctactaagtgtagatagccacccccgccacgcctctaatttctactaagtgtagatagcgtcgtacgatttatcgttaatttctactaagtgtagatttttttnnnnnnnnnnaagcttggcgtggatccgatatcaactagatcttgagacaaatggcagtattcatccacaattttaaaagaaaaggggggattggggggtacagtgcaggggaaagaatagtagacataatagcaacagacatacaaactaaag

SEQ ID NO: 18642 - DNA, 301 bp, Artificial Sequence
  Notch1.3_NTC.45
  crRNA array
  misc_feature (148)..(157): n is a, c, g, or t
cttggctttatatatcttgtggaaaggacgaaacaccgtaatttctactaagtgtagatagccacccccgccacgcctctaatttctactaagtgtagatcggaacgcgtgatactagggtaatttctactaagtgtagatttttttnnnnnnnnnnaagcttggcgtggatccgatatcaactagatcttgagacaaatggcagtattcatccacaattttaaaagaaaaggggggattggggggtacagtgcaggggaaagaatagtagacataatagcaacagacatacaaactaaag

SEQ ID NO: 18643 - DNA, 301 bp, Artificial Sequence
  Notch1.3_NTC.46
  crRNA array
  misc_feature (148)..(157): n is a, c, g, or t
cttggctttatatatcttgtggaaaggacgaaacaccgtaatttctactaagtgtagatagccacccccgccacgcctctaatttctactaagtgtagatagcgggtcgtagacgcgcggtaatttctactaagtgtagatttttttnnnnnnnnnnaagcttggcgtggatccgatatcaactagatcttgagacaaatggcagtattcatccacaattttaaaagaaaaggggggattggggggtacagtgcaggggaaagaatagtagacataatagcaacagacatacaaactaaag

SEQ ID NO: 18644 - DNA, 301 bp, Artificial Sequence
  Notch1.3_NTC.47
  crRNA array
  misc_feature (148)..(157): n is a, c, g, or t
cttggctttatatatcttgtggaaaggacgaaacaccgtaatttctactaagtgtagatagccacccccgccacgcctctaatttctactaagtgtagattctcgtatcgcgattgttaataatttctactaagtgtagatttttttnnnnnnnnnnaagcttggcgtggatccgatatcaactagatcttgagacaaatggcagtattcatccacaattttaaaagaaaaggggggattggggggtacagtgcaggggaaagaatagtagacataatagcaacagacatacaaactaaag

SEQ ID NO: 18645 - DNA, 301 bp, Artificial Sequence
  Notch1.3_NTC.48
  crRNA array
  misc_feature (148)..(157): n is a, c, g, or t
cttggctttatatatcttgtggaaaggacgaaacaccgtaatttctactaagtgtagatagccacccccgccacgcctctaatttctactaagtgtagatcggtcgactacggctgttagtaatttctactaagtgtagatttttttnnnnnnnnnnaagcttggcgtggatccgatatcaactagatcttgagacaaatggcagtattcatccacaattttaaaagaaaaggggggattggggggtacagtgcaggggaaagaatagtagacataatagcaacagacatacaaactaaag

SEQ ID NO: 18646 - DNA, 301 bp, Artificial Sequence
  Notch1.3_NTC.49
  crRNA array
  misc_feature (148)..(157): n is a, c, g, or t
cttggctttatatatcttgtggaaaggacgaaacaccgtaatttctactaagtgtagatagccacccccgccacgcctctaatttctactaagtgtagattcggggcgcgtcaactgaattaatttctactaagtgtagatttttttnnnnnnnnnnaagcttggcgtggatccgatatcaactagatcttgagacaaatggcagtattcatccacaattttaaaagaaaaggggggattggggggtacagtgcaggggaaagaatagtagacataatagcaacagacatacaaactaaag

SEQ ID NO: 18647 - DNA, 301 bp, Artificial Sequence
  Notch1.3_NTC.5
  crRNA array
  misc_feature (148)..(157): n is a, c, g, or t
cttggctttatatatcttgtggaaaggacgaaacaccgtaatttctactaagtgtagatagccacccccgccacgcctctaatttctactaagtgtagatgcttacgcgtcgcgaatgtataatttctactaagtgtagatttttttnnnnnnnnnnaagcttggcgtggatccgatatcaactagatcttgagacaaatggcagtattcatccacaattttaaaagaaaaggggggattggggggtacagtgcaggggaaagaatagtagacataatagcaacagacatacaaactaaag

SEQ ID NO: 18648 - DNA, 301 bp, Artificial Sequence
  Notch1.3_NTC.50
  crRNA array
  misc_feature (148)..(157): n is a, c, g, or t
cttggctttatatatcttgtggaaaggacgaaacaccgtaatttctactaagtgtagatagccacccccgccacgcctctaatttctactaagtgtagatattgccgctcgcgcaaaatctaatttctactaagtgtagatttttttnnnnnnnnnnaagcttggcgtggatccgatatcaactagatcttgagacaaatggcagtattcatccacaattttaaaagaaaaggggggattggggggtacagtgcaggggaaagaatagtagacataatagcaacagacatacaaactaaag

SEQ ID NO: 18649 - DNA, 301 bp, Artificial Sequence
  Notch1.3_NTC.51
  crRNA array
  misc_feature (148)..(157): n is a, c, g, or t
cttggctttatatatcttgtggaaaggacgaaacaccgtaatttctactaagtgtagatagccacccccgccacgcctctaatttctactaagtgtagattaacgcgcaacacgccaatgtaatttctactaagtgtagatttttttnnnnnnnnnnaagcttggcgtggatccgatatcaactagatcttgagacaaatggcagtattcatccacaattttaaaagaaaaggggggattggggggtacagtgcaggggaaagaatagtagacataatagcaacagacatacaaactaaag

SEQ ID NO: 18650 - DNA, 301 bp, Artificial Sequence
  Notch1.3_NTC.6
  crRNA array
  misc_feature (148)..(157): n is a, c, g, or t
cttggctttatatatcttgtggaaaggacgaaacaccgtaatttctactaagtgtagatagccacccccgccacgcctctaatttctactaagtgtagatcgaatcgcgcctacgggaattaatttctactaagtgtagatttttttnnnnnnnnnnaagcttggcgtggatccgatatcaactagatcttgagacaaatggcagtattcatccacaattttaaaagaaaaggggggattggggggtacagtgcaggggaaagaatagtagacataatagcaacagacatacaaactaaag

SEQ ID NO: 18651 - DNA, 301 bp, Artificial Sequence
  Notch1.3_NTC.7
  crRNA array
  misc_feature (148)..(157): n is a, c, g, or t
cttggctttatatatcttgtggaaaggacgaaacaccgtaatttctactaagtgtagatagccacccccgccacgcctctaatttctactaagtgtagatcgccgaacggataagactattaatttctactaagtgtagatttttttnnnnnnnnnnaagcttggcgtggatccgatatcaactagatcttgagacaaatggcagtattcatccacaattttaaaagaaaaggggggattggggggtacagtgcaggggaaagaatagtagacataatagcaacagacatacaaactaaag

SEQ ID NO: 18652 - DNA, 301 bp, Artificial Sequence
  Notch1.3_NTC.8
  crRNA array
  misc_feature (148)..(157): n is a, c, g, or t
cttggctttatatatcttgtggaaaggacgaaacaccgtaatttctactaagtgtagatagccacccccgccacgcctctaatttctactaagtgtagatcgaccgaggttacgctgggataatttctactaagtgtagatttttttnnnnnnnnnnaagcttggcgtggatccgatatcaactagatcttgagacaaatggcagtattcatccacaattttaaaagaaaaggggggattggggggtacagtgcaggggaaagaatagtagacataatagcaacagacatacaaactaaag

SEQ ID NO: 18653 - DNA, 301 bp, Artificial Sequence
  Notch1.3_NTC.9
  crRNA array
  misc_feature (148)..(157): n is a, c, g, or t
cttggctttatatatcttgtggaaaggacgaaacaccgtaatttctactaagtgtagatagccacccccgccacgcctctaatttctactaagtgtagatatcgccgtacggctatggcataatttctactaagtgtagatttttttnnnnnnnnnnaagcttggcgtggatccgatatcaactagatcttgagacaaatggcagtattcatccacaattttaaaagaaaaggggggattggggggtacagtgcaggggaaagaatagtagacataatagcaacagacatacaaactaaag

SEQ ID NO: 18654 - DNA, 301 bp, Artificial Sequence
  Notch1.4_NTC.0
  crRNA array
  misc_feature (148)..(157): n is a, c, g, or t
cttggctttatatatcttgtggaaaggacgaaacaccgtaatttctactaagtgtagataaagtgtcagaggccagcaataatttctactaagtgtagattatagcgtcgcgcgctaatttaatttctactaagtgtagatttttttnnnnnnnnnnaagcttggcgtggatccgatatcaactagatcttgagacaaatggcagtattcatccacaattttaaaagaaaaggggggattggggggtacagtgcaggggaaagaatagtagacataatagcaacagacatacaaactaaag

SEQ ID NO: 18655 - DNA, 301 bp, Artificial Sequence
  Notch1.4_NTC.1
  crRNA array
  misc_feature (148)..(157): n is a, c, g, or t
cttggctttatatatcttgtggaaaggacgaaacaccgtaatttctactaagtgtagataaagtgtcagaggccagcaataatttctactaagtgtagatcgcgtaaccgttccggctcctaatttctactaagtgtagatttttttnnnnnnnnnnaagcttggcgtggatccgatatcaactagatcttgagacaaatggcagtattcatccacaattttaaaagaaaaggggggattggggggtacagtgcaggggaaagaatagtagacataatagcaacagacatacaaactaaag

SEQ ID NO: 18656 - DNA, 301 bp, Artificial Sequence
  Notch1.4_NTC.10
  crRNA array
  misc_feature (148)..(157): n is a, c, g, or t
cttggctttatatatcttgtggaaaggacgaaacaccgtaatttctactaagtgtagataaagtgtcagaggccagcaataatttctactaagtgtagatcgctaagttcgcgcgggccgtaatttctactaagtgtagatttttttnnnnnnnnnnaagcttggcgtggatccgatatcaactagatcttgagacaaatggcagtattcatccacaattttaaaagaaaaggggggattggggggtacagtgcaggggaaagaatagtagacataatagcaacagacatacaaactaaag

SEQ ID NO: 18657 - DNA, 301 bp, Artificial Sequence
  Notch1.4_NTC.11
  crRNA array
  misc_feature (148)..(157): n is a, c, g, or t
cttggctttatatatcttgtggaaaggacgaaacaccgtaatttctactaagtgtagataaagtgtcagaggccagcaataatttctactaagtgtagatcgttcgtcgacgaagcaatctaatttctactaagtgtagatttttttnnnnnnnnnnaagcttggcgtggatccgatatcaactagatcttgagacaaatggcagtattcatccacaattttaaaagaaaaggggggattggggggtacagtgcaggggaaagaatagtagacataatagcaacagacatacaaactaaag

SEQ ID NO: 18658 - DNA, 301 bp, Artificial Sequence
  Notch1.4_NTC.12
  crRNA array
  misc_feature (148)..(157): n is a, c, g, or t
cttggctttatatatcttgtggaaaggacgaaacaccgtaatttctactaagtgtagataaagtgtcagaggccagcaataatttctactaagtgtagatcgccgacgattaatcaatagtaatttctactaagtgtagatttttttnnnnnnnnnnaagcttggcgtggatccgatatcaactagatcttgagacaaatggcagtattcatccacaattttaaaagaaaaggggggattggggggtacagtgcaggggaaagaatagtagacataatagcaacagacatacaaactaaag

SEQ ID NO: 18659 - DNA, 301 bp, Artificial Sequence
  Notch1.4_NTC.13
  crRNA array
  misc_feature (148)..(157): n is a, c, g, or t
cttggctttatatatcttgtggaaaggacgaaacaccgtaatttctactaagtgtagataaagtgtcagaggccagcaataatttctactaagtgtagatgaccgttgtatcgcgatcaataatttctactaagtgtagatttttttnnnnnnnnnnaagcttggcgtggatccgatatcaactagatcttgagacaaatggcagtattcatccacaattttaaaagaaaaggggggattggggggtacagtgcaggggaaagaatagtagacataatagcaacagacatacaaactaaag

SEQ ID NO: 18660 - DNA, 301 bp, Artificial Sequence
  Notch1.4_NTC.14
  crRNA array
  misc_feature (148)..(157): n is a, c, g, or t
cttggctttatatatcttgtggaaaggacgaaacaccgtaatttctactaagtgtagataaagtgtcagaggccagcaataatttctactaagtgtagatccgttcgtgcgatagtgttttaatttctactaagtgtagatttttttnnnnnnnnnnaagcttggcgtggatccgatatcaactagatcttgagacaaatggcagtattcatccacaattttaaaagaaaaggggggattggggggtacagtgcaggggaaagaatagtagacataatagcaacagacatacaaactaaag

SEQ ID NO: 18661 - DNA, 301 bp, Artificial Sequence
  Notch1.4_NTC.15
  crRNA array
  misc_feature (148)..(157): n is a, c, g, or t
cttggctttatatatcttgtggaaaggacgaaacaccgtaatttctactaagtgtagataaagtgtcagaggccagcaataatttctactaagtgtagatgttgtcgtgccgcgaatttataatttctactaagtgtagatttttttnnnnnnnnnnaagcttggcgtggatccgatatcaactagatcttgagacaaatggcagtattcatccacaattttaaaagaaaaggggggattggggggtacagtgcaggggaaagaatagtagacataatagcaacagacatacaaactaaag

SEQ ID NO: 18662 - DNA, 301 bp, Artificial Sequence
  Notch1.4_NTC.16
  crRNA array
  misc_feature (148)..(157): n is a, c, g, or t
cttggctttatatatcttgtggaaaggacgaaacaccgtaatttctactaagtgtagataaagtgtcagaggccagcaataatttctactaagtgtagatcggtacgttagacgaaaatttaatttctactaagtgtagatttttttnnnnnnnnnnaagcttggcgtggatccgatatcaactagatcttgagacaaatggcagtattcatccacaattttaaaagaaaaggggggattggggggtacagtgcaggggaaagaatagtagacataatagcaacagacatacaaactaaag

SEQ ID NO: 18663 - DNA, 301 bp, Artificial Sequence
  Notch1.4_NTC.17
  crRNA array
  misc_feature (148)..(157): n is a, c, g, or t
cttggctttatatatcttgtggaaaggacgaaacaccgtaatttctactaagtgtagataaagtgtcagaggccagcaataatttctactaagtgtagattatcgaacgctatcgaacgttaatttctactaagtgtagatttttttnnnnnnnnnnaagcttggcgtggatccgatatcaactagatcttgagacaaatggcagtattcatccacaattttaaaagaaaaggggggattggggggtacagtgcaggggaaagaatagtagacataatagcaacagacatacaaactaaag

SEQ ID NO: 18664 - DNA, 301 bp, Artificial Sequence
  Notch1.4_NTC.18
  crRNA array
  misc_feature (148)..(157): n is a, c, g, or t
cttggctttatatatcttgtggaaaggacgaaacaccgtaatttctactaagtgtagataaagtgtcagaggccagcaataatttctactaagtgtagattccggttacgaccggcaaaataatttctactaagtgtagatttttttnnnnnnnnnnaagcttggcgtggatccgatatcaactagatcttgagacaaatggcagtattcatccacaattttaaaagaaaaggggggattggggggtacagtgcaggggaaagaatagtagacataatagcaacagacatacaaactaaag

SEQ ID NO: 18665 - DNA, 301 bp, Artificial Sequence
  Notch1.4_NTC.19
  crRNA array
  misc_feature (148)..(157): n is a, c, g, or t
cttggctttatatatcttgtggaaaggacgaaacaccgtaatttctactaagtgtagataaagtgtcagaggccagcaataatttctactaagtgtagatcgtcgtagaacgatacccgataatttctactaagtgtagatttttttnnnnnnnnnnaagcttggcgtggatccgatatcaactagatcttgagacaaatggcagtattcatccacaattttaaaagaaaaggggggattggggggtacagtgcaggggaaagaatagtagacataatagcaacagacatacaaactaaag

SEQ ID NO: 18666 - DNA, 301 bp, Artificial Sequence
  Notch1.4_NTC.2
  crRNA array
  misc_feature (148)..(157): n is a, c, g, or t
cttggctttatatatcttgtggaaaggacgaaacaccgtaatttctactaagtgtagataaagtgtcagaggccagcaataatttctactaagtgtagatttatgtcgcgccgcgacccgtaatttctactaagtgtagatttttttnnnnnnnnnnaagcttggcgtggatccgatatcaactagatcttgagacaaatggcagtattcatccacaattttaaaagaaaaggggggattggggggtacagtgcaggggaaagaatagtagacataatagcaacagacatacaaactaaag

SEQ ID NO: 18667 - DNA, 301 bp, Artificial Sequence
  Notch1.4_NTC.20
  crRNA array
  misc_feature (148)..(157): n is a, c, g, or t
cttggctttatatatcttgtggaaaggacgaaacaccgtaatttctactaagtgtagataaagtgtcagaggccagcaataatttctactaagtgtagatattccggcgcgaccagaagataatttctactaagtgtagatttttttnnnnnnnnnnaagcttggcgtggatccgatatcaactagatcttgagacaaatggcagtattcatccacaattttaaaagaaaaggggggattggggggtacagtgcaggggaaagaatagtagacataatagcaacagacatacaaactaaag

SEQ ID NO: 18668 - DNA, 301 bp, Artificial Sequence
  Notch1.4_NTC.21
  crRNA array
  misc_feature (148)..(157): n is a, c, g, or t
cttggctttatatatcttgtggaaaggacgaaacaccgtaatttctactaagtgtagataaagtgtcagaggccagcaataatttctactaagtgtagatgtataacttcgcgcggtccgtaatttctactaagtgtagatttttttnnnnnnnnnnaagcttggcgtggatccgatatcaactagatcttgagacaaatggcagtattcatccacaattttaaaagaaaaggggggattggggggtacagtgcaggggaaagaatagtagacataatagcaacagacatacaaactaaag

SEQ ID NO: 18669 - DNA, 301 bp, Artificial Sequence
  Notch1.4_NTC.22
  crRNA array
  misc_feature (148)..(157): n is a, c, g, or t
cttggctttatatatcttgtggaaaggacgaaacaccgtaatttctactaagtgtagataaagtgtcagaggccagcaataatttctactaagtgtagatgcgcgtcaacgtaatgtgcctaatttctactaagtgtagatttttttnnnnnnnnnnaagcttggcgtggatccgatatcaactagatcttgagacaaatggcagtattcatccacaattttaaaagaaaaggggggattggggggtacagtgcaggggaaagaatagtagacataatagcaacagacatacaaactaaag

SEQ ID NO: 18670 - DNA, 301 bp, Artificial Sequence
  Notch1.4_NTC.23
  crRNA array
  misc_feature (148)..(157): n is a, c, g, or t
cttggctttatatatcttgtggaaaggacgaaacaccgtaatttctactaagtgtagataaagtgtcagaggccagcaataatttctactaagtgtagatacgcgctattatcgtaggtgtaatttctactaagtgtagatttttttnnnnnnnnnnaagcttggcgtggatccgatatcaactagatcttgagacaaatggcagtattcatccacaattttaaaagaaaaggggggattggggggtacagtgcaggggaaagaatagtagacataatagcaacagacatacaaactaaag

SEQ ID NO: 18671 - DNA, 301 bp, Artificial Sequence
  Notch1.4_NTC.24
  crRNA array
  misc_feature (148)..(157): n is a, c, g, or t
cttggctttatatatcttgtggaaaggacgaaacaccgtaatttctactaagtgtagataaagtgtcagaggccagcaataatttctactaagtgtagatactatcgacgttcgtcccggtaatttctactaagtgtagatttttttnnnnnnnnnnaagcttggcgtggatccgatatcaactagatcttgagacaaatggcagtattcatccacaattttaaaagaaaaggggggattggggggtacagtgcaggggaaagaatagtagacataatagcaacagacatacaaactaaag

SEQ ID NO: 18672 - DNA, 301 bp, Artificial Sequence
  Notch1.4_NTC.25
  crRNA array
  misc_feature (148)..(157): n is a, c, g, or t
cttggctttatatatcttgtggaaaggacgaaacaccgtaatttctactaagtgtagataaagtgtcagaggccagcaataatttctactaagtgtagattcgcgttatcgtgccgtgcgtaatttctactaagtgtagatttttttnnnnnnnnnnaagcttggcgtggatccgatatcaactagatcttgagacaaatggcagtattcatccacaattttaaaagaaaaggggggattggggggtacagtgcaggggaaagaatagtagacataatagcaacagacatacaaactaaag

SEQ ID NO: 18673 - DNA, 301 bp, Artificial Sequence
  Notch1.4_NTC.26
  crRNA array
  misc_feature (148)..(157): n is a, c, g, or t
cttggctttatatatcttgtggaaaggacgaaacaccgtaatttctactaagtgtagataaagtgtcagaggccagcaataatttctactaagtgtagatcgcgacggcggttttaacactaatttctactaagtgtagatttttttnnnnnnnnnnaagcttggcgtggatccgatatcaactagatcttgagacaaatggcagtattcatccacaattttaaaagaaaaggggggattggggggtacagtgcaggggaaagaatagtagacataatagcaacagacatacaaactaaag

SEQ ID NO: 18674 - DNA, 301 bp, Artificial Sequence
  Notch1.4_NTC.27
  crRNA array
  misc_feature (148)..(157): n is a, c, g, or t
cttggctttatatatcttgtggaaaggacgaaacaccgtaatttctactaagtgtagataaagtgtcagaggccagcaataatttctactaagtgtagatgtcgcgttgcgaccggcgcttaatttctactaagtgtagatttttttnnnnnnnnnnaagcttggcgtggatccgatatcaactagatcttgagacaaatggcagtattcatccacaattttaaaagaaaaggggggattggggggtacagtgcaggggaaagaatagtagacataatagcaacagacatacaaactaaag

SEQ ID NO: 18675 - DNA, 301 bp, Artificial Sequence
  Notch1.4_NTC.28
  crRNA array
  misc_feature (148)..(157): n is a, c, g, or t
cttggctttatatatcttgtggaaaggacgaaacaccgtaatttctactaagtgtagataaagtgtcagaggccagcaataatttctactaagtgtagataccgctaatcggcgtaaacttaatttctactaagtgtagatttttttnnnnnnnnnnaagcttggcgtggatccgatatcaactagatcttgagacaaatggcagtattcatccacaattttaaaagaaaaggggggattggggggtacagtgcaggggaaagaatagtagacataatagcaacagacatacaaactaaag

SEQ ID NO: 18676 - DNA, 301 bp, Artificial Sequence
  Notch1.4_NTC.29
  crRNA array
  misc_feature (148)..(157): n is a, c, g, or t
cttggctttatatatcttgtggaaaggacgaaacaccgtaatttctactaagtgtagataaagtgtcagaggccagcaataatttctactaagtgtagatcgcgatctataccgtctatataatttctactaagtgtagatttttttnnnnnnnnnnaagcttggcgtggatccgatatcaactagatcttgagacaaatggcagtattcatccacaattttaaaagaaaaggggggattggggggtacagtgcaggggaaagaatagtagacataatagcaacagacatacaaactaaag

SEQ ID NO: 18677 - DNA, 301 bp, Artificial Sequence
  Notch1.4_NTC.3
  crRNA array
  misc_feature (148)..(157): n is a, c, g, or t
cttggctttatatatcttgtggaaaggacgaaacaccgtaatttctactaagtgtagataaagtgtcagaggccagcaataatttctactaagtgtagattcgacgcgagacgacgtacataatttctactaagtgtagatttttttnnnnnnnnnnaagcttggcgtggatccgatatcaactagatcttgagacaaatggcagtattcatccacaattttaaaagaaaaggggggattggggggtacagtgcaggggaaagaatagtagacataatagcaacagacatacaaactaaag

SEQ ID NO: 18678 - DNA, 301 bp, Artificial Sequence
  Notch1.4_NTC.30
  crRNA array
  misc_feature (148)..(157): n is a, c, g, or t
cttggctttatatatcttgtggaaaggacgaaacaccgtaatttctactaagtgtagataaagtgtcagaggccagcaataatttctactaagtgtagatcgatcgtacgggtgtcctaataatttctactaagtgtagatttttttnnnnnnnnnnaagcttggcgtggatccgatatcaactagatcttgagacaaatggcagtattcatccacaattttaaaagaaaaggggggattggggggtacagtgcaggggaaagaatagtagacataatagcaacagacatacaaactaaag

SEQ ID NO: 18679 - DNA, 301 bp, Artificial Sequence
  Notch1.4_NTC.31
  crRNA array
  misc_feature (148)..(157): n is a, c, g, or t
cttggctttatatatcttgtggaaaggacgaaacaccgtaatttctactaagtgtagataaagtgtcagaggccagcaataatttctactaagtgtagatgccgaccgcgtgattgtaggtaatttctactaagtgtagatttttttnnnnnnnnnnaagcttggcgtggatccgatatcaactagatcttgagacaaatggcagtattcatccacaattttaaaagaaaaggggggattggggggtacagtgcaggggaaagaatagtagacataatagcaacagacatacaaactaaag

SEQ ID NO: 18680 - DNA, 301 bp, Artificial Sequence
  Notch1.4_NTC.32
  crRNA array
  misc_feature (148)..(157): n is a, c, g, or t
cttggctttatatatcttgtggaaaggacgaaacaccgtaatttctactaagtgtagataaagtgtcagaggccagcaataatttctactaagtgtagatgcacgttacgcccgggtcactaatttctactaagtgtagatttttttnnnnnnnnnnaagcttggcgtggatccgatatcaactagatcttgagacaaatggcagtattcatccacaattttaaaagaaaaggggggattggggggtacagtgcaggggaaagaatagtagacataatagcaacagacatacaaactaaag

SEQ ID NO: 18681 - DNA, 301 bp, Artificial Sequence
  Notch1.4_NTC.33
  crRNA array
  misc_feature (148)..(157): n is a, c, g, or t
cttggctttatatatcttgtggaaaggacgaaacaccgtaatttctactaagtgtagataaagtgtcagaggccagcaataatttctactaagtgtagattaagcgaccgacgcattcgctaatttctactaagtgtagatttttttnnnnnnnnnnaagcttggcgtggatccgatatcaactagatcttgagacaaatggcagtattcatccacaattttaaaagaaaaggggggattggggggtacagtgcaggggaaagaatagtagacataatagcaacagacatacaaactaaag

SEQ ID NO: 18682 - DNA, 301 bp, Artificial Sequence
  Notch1.4_NTC.34
  crRNA array
  misc_feature (148)..(157): n is a, c, g, or t
cttggctttatatatcttgtggaaaggacgaaacaccgtaatttctactaagtgtagataaagtgtcagaggccagcaataatttctactaagtgtagattagcgttcgacacgtgaaactaatttctactaagtgtagatttttttnnnnnnnnnnaagcttggcgtggatccgatatcaactagatcttgagacaaatggcagtattcatccacaattttaaaagaaaaggggggattggggggtacagtgcaggggaaagaatagtagacataatagcaacagacatacaaactaaag

SEQ ID NO: 18683 - DNA, 301 bp, Artificial Sequence
  Notch1.4_NTC.35
  crRNA array
  misc_feature (148)..(157): n is a, c, g, or t
cttggctttatatatcttgtggaaaggacgaaacaccgtaatttctactaagtgtagataaagtgtcagaggccagcaataatttctactaagtgtagattggcgcgtaatcgctattcgtaatttctactaagtgtagatttttttnnnnnnnnnnaagcttggcgtggatccgatatcaactagatcttgagacaaatggcagtattcatccacaattttaaaagaaaaggggggattggggggtacagtgcaggggaaagaatagtagacataatagcaacagacatacaaactaaag

SEQ ID NO: 18684 - DNA, 301 bp, Artificial Sequence
  Notch1.4_NTC.36
  crRNA array
  misc_feature (148)..(157): n is a, c, g, or t
cttggctttatatatcttgtggaaaggacgaaacaccgtaatttctactaagtgtagataaagtgtcagaggccagcaataatttctactaagtgtagatcaacccgccgtagcgggccttaatttctactaagtgtagatttttttnnnnnnnnnnaagcttggcgtggatccgatatcaactagatcttgagacaaatggcagtattcatccacaattttaaaagaaaaggggggattggggggtacagtgcaggggaaagaatagtagacataatagcaacagacatacaaactaaag

SEQ ID NO: 18685 - DNA, 301 bp, Artificial Sequence
  Notch1.4_NTC.37
  crRNA array
  misc_feature (148)..(157): n is a, c, g, or t
cttggctttatatatcttgtggaaaggacgaaacaccgtaatttctactaagtgtagataaagtgtcagaggccagcaataatttctactaagtgtagattttgcgttgacgcgattacttaatttctactaagtgtagatttttttnnnnnnnnnnaagcttggcgtggatccgatatcaactagatcttgagacaaatggcagtattcatccacaattttaaaagaaaaggggggattggggggtacagtgcaggggaaagaatagtagacataatagcaacagacatacaaactaaag

SEQ ID NO: 18686 - DNA, 301 bp, Artificial Sequence
  Notch1.4_NTC.38
  crRNA array
  misc_feature (148)..(157): n is a, c, g, or t
cttggctttatatatcttgtggaaaggacgaaacaccgtaatttctactaagtgtagataaagtgtcagaggccagcaataatttctactaagtgtagataacggagcgcgatactaccataatttctactaagtgtagatttttttnnnnnnnnnnaagcttggcgtggatccgatatcaactagatcttgagacaaatggcagtattcatccacaattttaaaagaaaaggggggattggggggtacagtgcaggggaaagaatagtagacataatagcaacagacatacaaactaaag

SEQ ID NO: 18687 - DNA, 301 bp, Artificial Sequence
  Notch1.4_NTC.39
  crRNA array
  misc_feature (148)..(157): n is a, c, g, or t
cttggctttatatatcttgtggaaaggacgaaacaccgtaatttctactaagtgtagataaagtgtcagaggccagcaataatttctactaagtgtagatccggacgttataacgtttcttaatttctactaagtgtagatttttttnnnnnnnnnnaagcttggcgtggatccgatatcaactagatcttgagacaaatggcagtattcatccacaattttaaaagaaaaggggggattggggggtacagtgcaggggaaagaatagtagacataatagcaacagacatacaaactaaag

SEQ ID NO: 18688 - DNA, 301 bp, Artificial Sequence
  Notch1.4_NTC.4
  crRNA array
  misc_feature (148)..(157): n is a, c, g, or t
cttggctttatatatcttgtggaaaggacgaaacaccgtaatttctactaagtgtagataaagtgtcagaggccagcaataatttctactaagtgtagatatacccgtcgcgaacgtgagtaatttctactaagtgtagatttttttnnnnnnnnnnaagcttggcgtggatccgatatcaactagatcttgagacaaatggcagtattcatccacaattttaaaagaaaaggggggattggggggtacagtgcaggggaaagaatagtagacataatagcaacagacatacaaactaaag

SEQ ID NO: 18689 - DNA, 301 bp, Artificial Sequence
  Notch1.4_NTC.40
  crRNA array
  misc_feature (148)..(157): n is a, c, g, or t
cttggctttatatatcttgtggaaaggacgaaacaccgtaatttctactaagtgtagataaagtgtcagaggccagcaataatttctactaagtgtagatattcgcgaacccggccggaataatttctactaagtgtagatttttttnnnnnnnnnnaagcttggcgtggatccgatatcaactagatcttgagacaaatggcagtattcatccacaattttaaaagaaaaggggggattggggggtacagtgcaggggaaagaatagtagacataatagcaacagacatacaaactaaag

SEQ ID NO: 18690 - DNA, 301 bp, Artificial Sequence
  Notch1.4_NTC.41
  crRNA array
  misc_feature (148)..(157): n is a, c, g, or t
cttggctttatatatcttgtggaaaggacgaaacaccgtaatttctactaagtgtagataaagtgtcagaggccagcaataatttctactaagtgtagatttgatggcgcgacgcgttattaatttctactaagtgtagatttttttnnnnnnnnnnaagcttggcgtggatccgatatcaactagatcttgagacaaatggcagtattcatccacaattttaaaagaaaaggggggattggggggtacagtgcaggggaaagaatagtagacataatagcaacagacatacaaactaaag

SEQ ID NO: 18691 - DNA, 301 bp, Artificial Sequence
  Notch1.4_NTC.42
  crRNA array
  misc_feature (148)..(157): n is a, c, g, or t
cttggctttatatatcttgtggaaaggacgaaacaccgtaatttctactaagtgtagataaagtgtcagaggccagcaataatttctactaagtgtagatggtcaaatcgcggcgataactaatttctactaagtgtagatttttttnnnnnnnnnnaagcttggcgtggatccgatatcaactagatcttgagacaaatggcagtattcatccacaattttaaaagaaaaggggggattggggggtacagtgcaggggaaagaatagtagacataatagcaacagacatacaaactaaag

SEQ ID NO: 18692 - DNA, 301 bp, Artificial Sequence
  Notch1.4_NTC.43
  crRNA array
  misc_feature (148)..(157): n is a, c, g, or t
cttggctttatatatcttgtggaaaggacgaaacaccgtaatttctactaagtgtagataaagtgtcagaggccagcaataatttctactaagtgtagatcgactcgcgcattgaactggtaatttctactaagtgtagatttttttnnnnnnnnnnaagcttggcgtggatccgatatcaactagatcttgagacaaatggcagtattcatccacaattttaaaagaaaaggggggattggggggtacagtgcaggggaaagaatagtagacataatagcaacagacatacaaactaaag

SEQ ID NO: 18693 - DNA, 301 bp, Artificial Sequence
  Notch1.4_NTC.44
  crRNA array
  misc_feature (148)..(157): n is a, c, g, or t
cttggctttatatatcttgtggaaaggacgaaacaccgtaatttctactaagtgtagataaagtgtcagaggccagcaataatttctactaagtgtagatagcgtcgtacgatttatcgttaatttctactaagtgtagatttttttnnnnnnnnnnaagcttggcgtggatccgatatcaactagatcttgagacaaatggcagtattcatccacaattttaaaagaaaaggggggattggggggtacagtgcaggggaaagaatagtagacataatagcaacagacatacaaactaaag

SEQ ID NO: 18694 - DNA, 301 bp, Artificial Sequence
  Notch1.4_NTC.45
  crRNA array
  misc_feature (148)..(157): n is a, c, g, or t
cttggctttatatatcttgtggaaaggacgaaacaccgtaatttctactaagtgtagataaagtgtcagaggccagcaataatttctactaagtgtagatcggaacgcgtgatactagggtaatttctactaagtgtagatttttttnnnnnnnnnnaagcttggcgtggatccgatatcaactagatcttgagacaaatggcagtattcatccacaattttaaaagaaaaggggggattggggggtacagtgcaggggaaagaatagtagacataatagcaacagacatacaaactaaag

SEQ ID NO: 18695 - DNA, 301 bp, Artificial Sequence
  Notch1.4_NTC.46
  crRNA array
  misc_feature (148)..(157): n is a, c, g, or t
cttggctttatatatcttgtggaaaggacgaaacaccgtaatttctactaagtgtagataaagtgtcagaggccagcaataatttctactaagtgtagatagcgggtcgtagacgcgcggtaatttctactaagtgtagatttttttnnnnnnnnnnaagcttggcgtggatccgatatcaactagatcttgagacaaatggcagtattcatccacaattttaaaagaaaaggggggattggggggtacagtgcaggggaaagaatagtagacataatagcaacagacatacaaactaaag

SEQ ID NO: 18696 - DNA, 301 bp, Artificial Sequence
  Notch1.4_NTC.47
  crRNA array
  misc_feature (148)..(157): n is a, c, g, or t
cttggctttatatatcttgtggaaaggacgaaacaccgtaatttctactaagtgtagataaagtgtcagaggccagcaataatttctactaagtgtagattctcgtatcgcgattgttaataatttctactaagtgtagatttttttnnnnnnnnnnaagcttggcgtggatccgatatcaactagatcttgagacaaatggcagtattcatccacaattttaaaagaaaaggggggattggggggtacagtgcaggggaaagaatagtagacataatagcaacagacatacaaactaaag

SEQ ID NO: 18697 - DNA, 301 bp, Artificial Sequence
  Notch1.4_NTC.48
  crRNA array
  misc_feature (148)..(157): n is a, c, g, or t
cttggctttatatatcttgtggaaaggacgaaacaccgtaatttctactaagtgtagataaagtgtcagaggccagcaataatttctactaagtgtagatcggtcgactacggctgttagtaatttctactaagtgtagatttttttnnnnnnnnnnaagcttggcgtggatccgatatcaactagatcttgagacaaatggcagtattcatccacaattttaaaagaaaaggggggattggggggtacagtgcaggggaaagaatagtagacataatagcaacagacatacaaactaaag

SEQ ID NO: 18698 - DNA, 301 bp, Artificial Sequence
  Notch1.4_NTC.49
  crRNA array
  misc_feature (148)..(157): n is a, c, g, or t
cttggctttatatatcttgtggaaaggacgaaacaccgtaatttctactaagtgtagataaagtgtcagaggccagcaataatttctactaagtgtagattcggggcgcgtcaactgaattaatttctactaagtgtagatttttttnnnnnnnnnnaagcttggcgtggatccgatatcaactagatcttgagacaaatggcagtattcatccacaattttaaaagaaaaggggggattggggggtacagtgcaggggaaagaatagtagacataatagcaacagacatacaaactaaag

SEQ ID NO: 18699 - DNA, 301 bp, Artificial Sequence
  Notch1.4_NTC.5
  crRNA array
  misc_feature (148)..(157): n is a, c, g, or t
cttggctttatatatcttgtggaaaggacgaaacaccgtaatttctactaagtgtagataaagtgtcagaggccagcaataatttctactaagtgtagatgcttacgcgtcgcgaatgtataatttctactaagtgtagatttttttnnnnnnnnnnaagcttggcgtggatccgatatcaactagatcttgagacaaatggcagtattcatccacaattttaaaagaaaaggggggattggggggtacagtgcaggggaaagaatagtagacataatagcaacagacatacaaactaaag

SEQ ID NO: 18700 - DNA, 301 bp, Artificial Sequence
  Notch1.4_NTC.50
  crRNA array
  misc_feature (148)..(157): n is a, c, g, or t
cttggctttatatatcttgtggaaaggacgaaacaccgtaatttctactaagtgtagataaagtgtcagaggccagcaataatttctactaagtgtagatattgccgctcgcgcaaaatctaatttctactaagtgtagatttttttnnnnnnnnnnaagcttggcgtggatccgatatcaactagatcttgagacaaatggcagtattcatccacaattttaaaagaaaaggggggattggggggtacagtgcaggggaaagaatagtagacataatagcaacagacatacaaactaaag

SEQ ID NO: 18701 - DNA, 301 bp, Artificial Sequence
  Notch1.4_NTC.51
  crRNA array
  misc_feature (148)..(157): n is a, c, g, or t
cttggctttatatatcttgtggaaaggacgaaacaccgtaatttctactaagtgtagataaagtgtcagaggccagcaataatttctactaagtgtagattaacgcgcaacacgccaatgtaatttctactaagtgtagatttttttnnnnnnnnnnaagcttggcgtggatccgatatcaactagatcttgagacaaatggcagtattcatccacaattttaaaagaaaaggggggattggggggtacagtgcaggggaaagaatagtagacataatagcaacagacatacaaactaaag

SEQ ID NO: 18702 - DNA, 301 bp, Artificial Sequence
  Notch1.4_NTC.6
  crRNA array
  misc_feature (148)..(157): n is a, c, g, or t
cttggctttatatatcttgtggaaaggacgaaacaccgtaatttctactaagtgtagataaagtgtcagaggccagcaataatttctactaagtgtagatcgaatcgcgcctacgggaattaatttctactaagtgtagatttttttnnnnnnnnnnaagcttggcgtggatccgatatcaactagatcttgagacaaatggcagtattcatccacaattttaaaagaaaaggggggattggggggtacagtgcaggggaaagaatagtagacataatagcaacagacatacaaactaaag

SEQ ID NO: 18703 - DNA, 301 bp, Artificial Sequence
  Notch1.4_NTC.7
  crRNA array
  misc_feature (148)..(157): n is a, c, g, or t
cttggctttatatatcttgtggaaaggacgaaacaccgtaatttctactaagtgtagataaagtgtcagaggccagcaataatttctactaagtgtagatcgccgaacggataagactattaatttctactaagtgtagatttttttnnnnnnnnnnaagcttggcgtggatccgatatcaactagatcttgagacaaatggcagtattcatccacaattttaaaagaaaaggggggattggggggtacagtgcaggggaaagaatagtagacataatagcaacagacatacaaactaaag

SEQ ID NO: 18704 - DNA, 301 bp, Artificial Sequence
  Notch1.4_NTC.8
  crRNA array
  misc_feature (148)..(157): n is a, c, g, or t
cttggctttatatatcttgtggaaaggacgaaacaccgtaatttctactaagtgtagataaagtgtcagaggccagcaataatttctactaagtgtagatcgaccgaggttacgctgggataatttctactaagtgtagatttttttnnnnnnnnnnaagcttggcgtggatccgatatcaactagatcttgagacaaatggcagtattcatccacaattttaaaagaaaaggggggattggggggtacagtgcaggggaaagaatagtagacataatagcaacagacatacaaactaaag

SEQ ID NO: 18705 - DNA, 301 bp, Artificial Sequence
  Notch1.4_NTC.9
  crRNA array
  misc_feature (148)..(157): n is a, c, g, or t
cttggctttatatatcttgtggaaaggacgaaacaccgtaatttctactaagtgtagataaagtgtcagaggccagcaataatttctactaagtgtagatatcgccgtacggctatggcataatttctactaagtgtagatttttttnnnnnnnnnnaagcttggcgtggatccgatatcaactagatcttgagacaaatggcagtattcatccacaattttaaaagaaaaggggggattggggggtacagtgcaggggaaagaatagtagacataatagcaacagacatacaaactaaag

SEQ ID NO: 18706 - DNA, 301 bp, Artificial Sequence
  Pole.1_NTC.0
  crRNA array
  misc_feature (148)..(157): n is a, c, g, or t
cttggctttatatatcttgtggaaaggacgaaacaccgtaatttctactaagtgtagatgcgcgctctccacgtgctcttaatttctactaagtgtagattatagcgtcgcgcgctaatttaatttctactaagtgtagatttttttnnnnnnnnnnaagcttggcgtggatccgatatcaactagatcttgagacaaatggcagtattcatccacaattttaaaagaaaaggggggattggggggtacagtgcaggggaaagaatagtagacataatagcaacagacatacaaactaaag

SEQ ID NO: 18707 - DNA, 301 bp, Artificial Sequence
  Pole.1_NTC.1
  crRNA array
  misc_feature (148)..(157): n is a, c, g, or t
cttggctttatatatcttgtggaaaggacgaaacaccgtaatttctactaagtgtagatgcgcgctctccacgtgctcttaatttctactaagtgtagatcgcgtaaccgttccggctcctaatttctactaagtgtagatttttttnnnnnnnnnnaagcttggcgtggatccgatatcaactagatcttgagacaaatggcagtattcatccacaattttaaaagaaaaggggggattggggggtacagtgcaggggaaagaatagtagacataatagcaacagacatacaaactaaag

SEQ ID NO: 18708 - DNA, 301 bp, Artificial Sequence
  Pole.1_NTC.10
  crRNA array
  misc_feature (148)..(157): n is a, c, g, or t
cttggctttatatatcttgtggaaaggacgaaacaccgtaatttctactaagtgtagatgcgcgctctccacgtgctcttaatttctactaagtgtagatcgctaagttcgcgcgggccgtaatttctactaagtgtagatttttttnnnnnnnnnnaagcttggcgtggatccgatatcaactagatcttgagacaaatggcagtattcatccacaattttaaaagaaaaggggggattggggggtacagtgcaggggaaagaatagtagacataatagcaacagacatacaaactaaag

SEQ ID NO: 18709 - DNA, 301 bp, Artificial Sequence
  Pole.1_NTC.11
  crRNA array
  misc_feature (148)..(157): n is a, c, g, or t
cttggctttatatatcttgtggaaaggacgaaacaccgtaatttctactaagtgtagatgcgcgctctccacgtgctcttaatttctactaagtgtagatcgttcgtcgacgaagcaatctaatttctactaagtgtagatttttttnnnnnnnnnnaagcttggcgtggatccgatatcaactagatcttgagacaaatggcagtattcatccacaattttaaaagaaaaggggggattggggggtacagtgcaggggaaagaatagtagacataatagcaacagacatacaaactaaag

SEQ ID NO: 18710 - DNA, 301 bp, Artificial Sequence
  Pole.1_NTC.12
  crRNA array
  misc_feature (148)..(157): n is a, c, g, or t
cttggctttatatatcttgtggaaaggacgaaacaccgtaatttctactaagtgtagatgcgcgctctccacgtgctcttaatttctactaagtgtagatcgccgacgattaatcaatagtaatttctactaagtgtagatttttttnnnnnnnnnnaagcttggcgtggatccgatatcaactagatcttgagacaaatggcagtattcatccacaattttaaaagaaaaggggggattggggggtacagtgcaggggaaagaatagtagacataatagcaacagacatacaaactaaag

SEQ ID NO: 18711 - DNA, 301 bp, Artificial Sequence
  Pole.1_NTC.13
  crRNA array
  misc_feature (148)..(157): n is a, c, g, or t
cttggctttatatatcttgtggaaaggacgaaacaccgtaatttctactaagtgtagatgcgcgctctccacgtgctcttaatttctactaagtgtagatgaccgttgtatcgcgatcaataatttctactaagtgtagatttttttnnnnnnnnnnaagcttggcgtggatccgatatcaactagatcttgagacaaatggcagtattcatccacaattttaaaagaaaaggggggattggggggtacagtgcaggggaaagaatagtagacataatagcaacagacatacaaactaaag

SEQ ID NO: 18712 - DNA, 301 bp, Artificial Sequence
  Pole.1_NTC.14
  crRNA array
  misc_feature (148)..(157): n is a, c, g, or t
cttggctttatatatcttgtggaaaggacgaaacaccgtaatttctactaagtgtagatgcgcgctctccacgtgctcttaatttctactaagtgtagatccgttcgtgcgatagtgttttaatttctactaagtgtagatttttttnnnnnnnnnnaagcttggcgtggatccgatatcaactagatcttgagacaaatggcagtattcatccacaattttaaaagaaaaggggggattggggggtacagtgcaggggaaagaatagtagacataatagcaacagacatacaaactaaag

SEQ ID NO: 18713 - DNA, 301 bp, Artificial Sequence
  Pole.1_NTC.15
  crRNA array
  misc_feature (148)..(157): n is a, c, g, or t
cttggctttatatatcttgtggaaaggacgaaacaccgtaatttctactaagtgtagatgcgcgctctccacgtgctcttaatttctactaagtgtagatgttgtcgtgccgcgaatttataatttctactaagtgtagatttttttnnnnnnnnnnaagcttggcgtggatccgatatcaactagatcttgagacaaatggcagtattcatccacaattttaaaagaaaaggggggattggggggtacagtgcaggggaaagaatagtagacataatagcaacagacatacaaactaaag

SEQ ID NO: 18714 - DNA, 301 bp, Artificial Sequence
  Pole.1_NTC.16
  crRNA array
  misc_feature (148)..(157): n is a, c, g, or t
cttggctttatatatcttgtggaaaggacgaaacaccgtaatttctactaagtgtagatgcgcgctctccacgtgctcttaatttctactaagtgtagatcggtacgttagacgaaaatttaatttctactaagtgtagatttttttnnnnnnnnnnaagcttggcgtggatccgatatcaactagatcttgagacaaatggcagtattcatccacaattttaaaagaaaaggggggattggggggtacagtgcaggggaaagaatagtagacataatagcaacagacatacaaactaaag

SEQ ID NO: 18715 - DNA, 301 bp, Artificial Sequence
  Pole.1_NTC.17
  crRNA array
  misc_feature (148)..(157): n is a, c, g, or t
cttggctttatatatcttgtggaaaggacgaaacaccgtaatttctactaagtgtagatgcgcgctctccacgtgctcttaatttctactaagtgtagattatcgaacgctatcgaacgttaatttctactaagtgtagatttttttnnnnnnnnnnaagcttggcgtggatccgatatcaactagatcttgagacaaatggcagtattcatccacaattttaaaagaaaaggggggattggggggtacagtgcaggggaaagaatagtagacataatagcaacagacatacaaactaaag

SEQ ID NO: 18716 - DNA, 301 bp, Artificial Sequence
  Pole.1_NTC.18
  crRNA array
  misc_feature (148)..(157): n is a, c, g, or t
cttggctttatatatcttgtggaaaggacgaaacaccgtaatttctactaagtgtagatgcgcgctctccacgtgctcttaatttctactaagtgtagattccggttacgaccggcaaaataatttctactaagtgtagatttttttnnnnnnnnnnaagcttggcgtggatccgatatcaactagatcttgagacaaatggcagtattcatccacaattttaaaagaaaaggggggattggggggtacagtgcaggggaaagaatagtagacataatagcaacagacatacaaactaaag

SEQ ID NO: 18717 - DNA, 301 bp, Artificial Sequence
  Pole.1_NTC.19
  crRNA array
  misc_feature (148)..(157): n is a, c, g, or t
cttggctttatatatcttgtggaaaggacgaaacaccgtaatttctactaagtgtagatgcgcgctctccacgtgctcttaatttctactaagtgtagatcgtcgtagaacgatacccgataatttctactaagtgtagatttttttnnnnnnnnnnaagcttggcgtggatccgatatcaactagatcttgagacaaatggcagtattcatccacaattttaaaagaaaaggggggattggggggtacagtgcaggggaaagaatagtagacataatagcaacagacatacaaactaaag

SEQ ID NO: 18718 - DNA, 301 bp, Artificial Sequence
  Pole.1_NTC.2
  crRNA array
  misc_feature (148)..(157): n is a, c, g, or t
cttggctttatatatcttgtggaaaggacgaaacaccgtaatttctactaagtgtagatgcgcgctctccacgtgctcttaatttctactaagtgtagatttatgtcgcgccgcgacccgtaatttctactaagtgtagatttttttnnnnnnnnnnaagcttggcgtggatccgatatcaactagatcttgagacaaatggcagtattcatccacaattttaaaagaaaaggggggattggggggtacagtgcaggggaaagaatagtagacataatagcaacagacatacaaactaaag

SEQ ID NO: 18719 - DNA, 301 bp, Artificial Sequence
  Pole.1_NTC.20
  crRNA array
  misc_feature (148)..(157): n is a, c, g, or t
cttggctttatatatcttgtggaaaggacgaaacaccgtaatttctactaagtgtagatgcgcgctctccacgtgctcttaatttctactaagtgtagatattccggcgcgaccagaagataatttctactaagtgtagatttttttnnnnnnnnnnaagcttggcgtggatccgatatcaactagatcttgagacaaatggcagtattcatccacaattttaaaagaaaaggggggattggggggtacagtgcaggggaaagaatagtagacataatagcaacagacatacaaactaaag

SEQ ID NO: 18720 - DNA, 301 bp, Artificial Sequence
  Pole.1_NTC.21
  crRNA array
  misc_feature (148)..(157): n is a, c, g, or t
cttggctttatatatcttgtggaaaggacgaaacaccgtaatttctactaagtgtagatgcgcgctctccacgtgctcttaatttctactaagtgtagatgtataacttcgcgcggtccgtaatttctactaagtgtagatttttttnnnnnnnnnnaagcttggcgtggatccgatatcaactagatcttgagacaaatggcagtattcatccacaattttaaaagaaaaggggggattggggggtacagtgcaggggaaagaatagtagacataatagcaacagacatacaaactaaag

SEQ ID NO: 18721 - DNA, 301 bp, Artificial Sequence
  Pole.1_NTC.22
  crRNA array
  misc_feature (148)..(157): n is a, c, g, or t
cttggctttatatatcttgtggaaaggacgaaacaccgtaatttctactaagtgtagatgcgcgctctccacgtgctcttaatttctactaagtgtagatgcgcgtcaacgtaatgtgcctaatttctactaagtgtagatttttttnnnnnnnnnnaagcttggcgtggatccgatatcaactagatcttgagacaaatggcagtattcatccacaattttaaaagaaaaggggggattggggggtacagtgcaggggaaagaatagtagacataatagcaacagacatacaaactaaag

SEQ ID NO: 18722 - DNA, 301 bp, Artificial Sequence
  Pole.1_NTC.23
  crRNA array
  misc_feature (148)..(157): n is a, c, g, or t
cttggctttatatatcttgtggaaaggacgaaacaccgtaatttctactaagtgtagatgcgcgctctccacgtgctcttaatttctactaagtgtagatacgcgctattatcgtaggtgtaatttctactaagtgtagatttttttnnnnnnnnnnaagcttggcgtggatccgatatcaactagatcttgagacaaatggcagtattcatccacaattttaaaagaaaaggggggattggggggtacagtgcaggggaaagaatagtagacataatagcaacagacatacaaactaaag

SEQ ID NO: 18723 - DNA, 301 bp, Artificial Sequence
  Pole.1_NTC.24
  crRNA array
  misc_feature (148)..(157): n is a, c, g, or t
cttggctttatatatcttgtggaaaggacgaaacaccgtaatttctactaagtgtagatgcgcgctctccacgtgctcttaatttctactaagtgtagatactatcgacgttcgtcccggtaatttctactaagtgtagatttttttnnnnnnnnnnaagcttggcgtggatccgatatcaactagatcttgagacaaatggcagtattcatccacaattttaaaagaaaaggggggattggggggtacagtgcaggggaaagaatagtagacataatagcaacagacatacaaactaaag

SEQ ID NO: 18724 - DNA, 301 bp, Artificial Sequence
  Pole.1_NTC.25
  crRNA array
  misc_feature (148)..(157): n is a, c, g, or t
cttggctttatatatcttgtggaaaggacgaaacaccgtaatttctactaagtgtagatgcgcgctctccacgtgctcttaatttctactaagtgtagattcgcgttatcgtgccgtgcgtaatttctactaagtgtagatttttttnnnnnnnnnnaagcttggcgtggatccgatatcaactagatcttgagacaaatggcagtattcatccacaattttaaaagaaaaggggggattggggggtacagtgcaggggaaagaatagtagacataatagcaacagacatacaaactaaag

SEQ ID NO: 18725 - DNA, 301 bp, Artificial Sequence
  Pole.1_NTC.26
  crRNA array
  misc_feature (148)..(157): n is a, c, g, or t
cttggctttatatatcttgtggaaaggacgaaacaccgtaatttctactaagtgtagatgcgcgctctccacgtgctcttaatttctactaagtgtagatcgcgacggcggttttaacactaatttctactaagtgtagatttttttnnnnnnnnnnaagcttggcgtggatccgatatcaactagatcttgagacaaatggcagtattcatccacaattttaaaagaaaaggggggattggggggtacagtgcaggggaaagaatagtagacataatagcaacagacatacaaactaaag

SEQ ID NO: 18726 - DNA, 301 bp, Artificial Sequence
  Pole.1_NTC.27
  crRNA array
  misc_feature (148)..(157): n is a, c, g, or t
cttggctttatatatcttgtggaaaggacgaaacaccgtaatttctactaagtgtagatgcgcgctctccacgtgctcttaatttctactaagtgtagatgtcgcgttgcgaccggcgcttaatttctactaagtgtagatttttttnnnnnnnnnnaagcttggcgtggatccgatatcaactagatcttgagacaaatggcagtattcatccacaattttaaaagaaaaggggggattggggggtacagtgcaggggaaagaatagtagacataatagcaacagacatacaaactaaag

SEQ ID NO: 18727 - DNA, 301 bp, Artificial Sequence
  Pole.1_NTC.28
  crRNA array
  misc_feature (148)..(157): n is a, c, g, or t
cttggctttatatatcttgtggaaaggacgaaacaccgtaatttctactaagtgtagatgcgcgctctccacgtgctcttaatttctactaagtgtagataccgctaatcggcgtaaacttaatttctactaagtgtagatttttttnnnnnnnnnnaagcttggcgtggatccgatatcaactagatcttgagacaaatggcagtattcatccacaattttaaaagaaaaggggggattggggggtacagtgcaggggaaagaatagtagacataatagcaacagacatacaaactaaag

SEQ ID NO: 18728 - DNA, 301 bp, Artificial Sequence
  Pole.1_NTC.29
  crRNA array
  misc_feature (148)..(157): n is a, c, g, or t
cttggctttatatatcttgtggaaaggacgaaacaccgtaatttctactaagtgtagatgcgcgctctccacgtgctcttaatttctactaagtgtagatcgcgatctataccgtctatataatttctactaagtgtagatttttttnnnnnnnnnnaagcttggcgtggatccgatatcaactagatcttgagacaaatggcagtattcatccacaattttaaaagaaaaggggggattggggggtacagtgcaggggaaagaatagtagacataatagcaacagacatacaaactaaag

SEQ ID NO: 18729 - DNA, 301 bp, Artificial Sequence
  Pole.1_NTC.3
  crRNA array
  misc_feature (148)..(157): n is a, c, g, or t
cttggctttatatatcttgtggaaaggacgaaacaccgtaatttctactaagtgtagatgcgcgctctccacgtgctcttaatttctactaagtgtagattcgacgcgagacgacgtacataatttctactaagtgtagatttttttnnnnnnnnnnaagcttggcgtggatccgatatcaactagatcttgagacaaatggcagtattcatccacaattttaaaagaaaaggggggattggggggtacagtgcaggggaaagaatagtagacataatagcaacagacatacaaactaaag

SEQ ID NO: 18730 - DNA, 301 bp, Artificial Sequence
  Pole.1_NTC.30
  crRNA array
  misc_feature (148)..(157): n is a, c, g, or t
cttggctttatatatcttgtggaaaggacgaaacaccgtaatttctactaagtgtagatgcgcgctctccacgtgctcttaatttctactaagtgtagatcgatcgtacgggtgtcctaataatttctactaagtgtagatttttttnnnnnnnnnnaagcttggcgtggatccgatatcaactagatcttgagacaaatggcagtattcatccacaattttaaaagaaaaggggggattggggggtacagtgcaggggaaagaatagtagacataatagcaacagacatacaaactaaag

SEQ ID NO: 18731 - DNA, 301 bp, Artificial Sequence
  Pole.1_NTC.31
  crRNA array
  misc_feature (148)..(157): n is a, c, g, or t
cttggctttatatatcttgtggaaaggacgaaacaccgtaatttctactaagtgtagatgcgcgctctccacgtgctcttaatttctactaagtgtagatgccgaccgcgtgattgtaggtaatttctactaagtgtagatttttttnnnnnnnnnnaagcttggcgtggatccgatatcaactagatcttgagacaaatggcagtattcatccacaattttaaaagaaaaggggggattggggggtacagtgcaggggaaagaatagtagacataatagcaacagacatacaaactaaag

SEQ ID NO: 18732 - DNA, 301 bp, Artificial Sequence
  Pole.1_NTC.32
  crRNA array
  misc_feature (148)..(157): n is a, c, g, or t
cttggctttatatatcttgtggaaaggacgaaacaccgtaatttctactaagtgtagatgcgcgctctccacgtgctcttaatttctactaagtgtagatgcacgttacgcccgggtcactaatttctactaagtgtagatttttttnnnnnnnnnnaagcttggcgtggatccgatatcaactagatcttgagacaaatggcagtattcatccacaattttaaaagaaaaggggggattggggggtacagtgcaggggaaagaatagtagacataatagcaacagacatacaaactaaag

SEQ ID NO: 18733 - DNA, 301 bp, Artificial Sequence
  Pole.1_NTC.33
  crRNA array
  misc_feature (148)..(157): n is a, c, g, or t
cttggctttatatatcttgtggaaaggacgaaacaccgtaatttctactaagtgtagatgcgcgctctccacgtgctcttaatttctactaagtgtagattaagcgaccgacgcattcgctaatttctactaagtgtagatttttttnnnnnnnnnnaagcttggcgtggatccgatatcaactagatcttgagacaaatggcagtattcatccacaattttaaaagaaaaggggggattggggggtacagtgcaggggaaagaatagtagacataatagcaacagacatacaaactaaag

SEQ ID NO: 18734 - DNA, 301 bp, Artificial Sequence
  Pole.1_NTC.34
  crRNA array
  misc_feature (148)..(157): n is a, c, g, or t
cttggctttatatatcttgtggaaaggacgaaacaccgtaatttctactaagtgtagatgcgcgctctccacgtgctcttaatttctactaagtgtagattagcgttcgacacgtgaaactaatttctactaagtgtagatttttttnnnnnnnnnnaagcttggcgtggatccgatatcaactagatcttgagacaaatggcagtattcatccacaattttaaaagaaaaggggggattggggggtacagtgcaggggaaagaatagtagacataatagcaacagacatacaaactaaag

SEQ ID NO: 18735 - DNA, 301 bp, Artificial Sequence
  Pole.1_NTC.35
  crRNA array
  misc_feature (148)..(157): n is a, c, g, or t
cttggctttatatatcttgtggaaaggacgaaacaccgtaatttctactaagtgtagatgcgcgctctccacgtgctcttaatttctactaagtgtagattggcgcgtaatcgctattcgtaatttctactaagtgtagatttttttnnnnnnnnnnaagcttggcgtggatccgatatcaactagatcttgagacaaatggcagtattcatccacaattttaaaagaaaaggggggattggggggtacagtgcaggggaaagaatagtagacataatagcaacagacatacaaactaaag

SEQ ID NO: 18736 - DNA, 301 bp, Artificial Sequence
  Pole.1_NTC.36
  crRNA array
  misc_feature (148)..(157): n is a, c, g, or t
cttggctttatatatcttgtggaaaggacgaaacaccgtaatttctactaagtgtagatgcgcgctctccacgtgctcttaatttctactaagtgtagatcaacccgccgtagcgggccttaatttctactaagtgtagatttttttnnnnnnnnnnaagcttggcgtggatccgatatcaactagatcttgagacaaatggcagtattcatccacaattttaaaagaaaaggggggattggggggtacagtgcaggggaaagaatagtagacataatagcaacagacatacaaactaaag

SEQ ID NO: 18737 - DNA, 301 bp, Artificial Sequence
  Pole.1_NTC.37
  crRNA array
  misc_feature (148)..(157): n is a, c, g, or t
cttggctttatatatcttgtggaaaggacgaaacaccgtaatttctactaagtgtagatgcgcgctctccacgtgctcttaatttctactaagtgtagattttgcgttgacgcgattacttaatttctactaagtgtagatttttttnnnnnnnnnnaagcttggcgtggatccgatatcaactagatcttgagacaaatggcagtattcatccacaattttaaaagaaaaggggggattggggggtacagtgcaggggaaagaatagtagacataatagcaacagacatacaaactaaag

SEQ ID NO: 18738 - DNA, 301 bp, Artificial Sequence
  Pole.1_NTC.38
  crRNA array
  misc_feature (148)..(157): n is a, c, g, or t
cttggctttatatatcttgtggaaaggacgaaacaccgtaatttctactaagtgtagatgcgcgctctccacgtgctcttaatttctactaagtgtagataacggagcgcgatactaccataatttctactaagtgtagatttttttnnnnnnnnnnaagcttggcgtggatccgatatcaactagatcttgagacaaatggcagtattcatccacaattttaaaagaaaaggggggattggggggtacagtgcaggggaaagaatagtagacataatagcaacagacatacaaactaaag

SEQ ID NO: 18739 - DNA, 301 bp, Artificial Sequence
  Pole.1_NTC.39
  crRNA array
  misc_feature (148)..(157): n is a, c, g, or t
cttggctttatatatcttgtggaaaggacgaaacaccgtaatttctactaagtgtagatgcgcgctctccacgtgctcttaatttctactaagtgtagatccggacgttataacgtttcttaatttctactaagtgtagatttttttnnnnnnnnnnaagcttggcgtggatccgatatcaactagatcttgagacaaatggcagtattcatccacaattttaaaagaaaaggggggattggggggtacagtgcaggggaaagaatagtagacataatagcaacagacatacaaactaaag

SEQ ID NO: 18740 - DNA, 301 bp, Artificial Sequence
  Pole.1_NTC.4
  crRNA array
  misc_feature (148)..(157): n is a, c, g, or t
cttggctttatatatcttgtggaaaggacgaaacaccgtaatttctactaagtgtagatgcgcgctctccacgtgctcttaatttctactaagtgtagatatacccgtcgcgaacgtgagtaatttctactaagtgtagatttttttnnnnnnnnnnaagcttggcgtggatccgatatcaactagatcttgagacaaatggcagtattcatccacaattttaaaagaaaaggggggattggggggtacagtgcaggggaaagaatagtagacataatagcaacagacatacaaactaaag

SEQ ID NO: 18741 - DNA, 301 bp, Artificial Sequence
  Pole.1_NTC.40
  crRNA array
  misc_feature (148)..(157): n is a, c, g, or t
cttggctttatatatcttgtggaaaggacgaaacaccgtaatttctactaagtgtagatgcgcgctctccacgtgctcttaatttctactaagtgtagatattcgcgaacccggccggaataatttctactaagtgtagatttttttnnnnnnnnnnaagcttggcgtggatccgatatcaactagatcttgagacaaatggcagtattcatccacaattttaaaagaaaaggggggattggggggtacagtgcaggggaaagaatagtagacataatagcaacagacatacaaactaaag

SEQ ID NO: 18742 - DNA, 301 bp, Artificial Sequence
  Pole.1_NTC.41
  crRNA array
  misc_feature (148)..(157): n is a, c, g, or t
cttggctttatatatcttgtggaaaggacgaaacaccgtaatttctactaagtgtagatgcgcgctctccacgtgctcttaatttctactaagtgtagatttgatggcgcgacgcgttattaatttctactaagtgtagatttttttnnnnnnnnnnaagcttggcgtggatccgatatcaactagatcttgagacaaatggcagtattcatccacaattttaaaagaaaaggggggattggggggtacagtgcaggggaaagaatagtagacataatagcaacagacatacaaactaaag

SEQ ID NO: 18743 - DNA, 301 bp, Artificial Sequence
  Pole.1_NTC.42
  crRNA array
  misc_feature (148)..(157): n is a, c, g, or t
cttggctttatatatcttgtggaaaggacgaaacaccgtaatttctactaagtgtagatgcgcgctctccacgtgctcttaatttctactaagtgtagatggtcaaatcgcggcgataactaatttctactaagtgtagatttttttnnnnnnnnnnaagcttggcgtggatccgatatcaactagatcttgagacaaatggcagtattcatccacaattttaaaagaaaaggggggattggggggtacagtgcaggggaaagaatagtagacataatagcaacagacatacaaactaaag

SEQ ID NO: 18744 - DNA, 301 bp, Artificial Sequence
  Pole.1_NTC.43
  crRNA array
  misc_feature (148)..(157): n is a, c, g, or t
cttggctttatatatcttgtggaaaggacgaaacaccgtaatttctactaagtgtagatgcgcgctctccacgtgctcttaatttctactaagtgtagatcgactcgcgcattgaactggtaatttctactaagtgtagatttttttnnnnnnnnnnaagcttggcgtggatccgatatcaactagatcttgagacaaatggcagtattcatccacaattttaaaagaaaaggggggattggggggtacagtgcaggggaaagaatagtagacataatagcaacagacatacaaactaaag

SEQ ID NO: 18745 - DNA, 301 bp, Artificial Sequence
  Pole.1_NTC.44
  crRNA array
  misc_feature (148)..(157): n is a, c, g, or t
cttggctttatatatcttgtggaaaggacgaaacaccgtaatttctactaagtgtagatgcgcgctctccacgtgctcttaatttctactaagtgtagatagcgtcgtacgatttatcgttaatttctactaagtgtagatttttttnnnnnnnnnnaagcttggcgtggatccgatatcaactagatcttgagacaaatggcagtattcatccacaattttaaaagaaaaggggggattggggggtacagtgcaggggaaagaatagtagacataatagcaacagacatacaaactaaag

SEQ ID NO: 18746 - DNA, 301 bp, Artificial Sequence
  Pole.1_NTC.45
  crRNA array
  misc_feature (148)..(157): n is a, c, g, or t
cttggctttatatatcttgtggaaaggacgaaacaccgtaatttctactaagtgtagatgcgcgctctccacgtgctcttaatttctactaagtgtagatcggaacgcgtgatactagggtaatttctactaagtgtagatttttttnnnnnnnnnnaagcttggcgtggatccgatatcaactagatcttgagacaaatggcagtattcatccacaattttaaaagaaaaggggggattggggggtacagtgcaggggaaagaatagtagacataatagcaacagacatacaaactaaag

SEQ ID NO: 18747 - DNA, 301 bp, Artificial Sequence
  Pole.1_NTC.46
  crRNA array
  misc_feature (148)..(157): n is a, c, g, or t
cttggctttatatatcttgtggaaaggacgaaacaccgtaatttctactaagtgtagatgcgcgctctccacgtgctcttaatttctactaagtgtagatagcgggtcgtagacgcgcggtaatttctactaagtgtagatttttttnnnnnnnnnnaagcttggcgtggatccgatatcaactagatcttgagacaaatggcagtattcatccacaattttaaaagaaaaggggggattggggggtacagtgcaggggaaagaatagtagacataatagcaacagacatacaaactaaag

SEQ ID NO: 18748 - DNA, 301 bp, Artificial Sequence
  Pole.1_NTC.47
  crRNA array
  misc_feature (148)..(157): n is a, c, g, or t
cttggctttatatatcttgtggaaaggacgaaacaccgtaatttctactaagtgtagatgcgcgctctccacgtgctcttaatttctactaagtgtagattctcgtatcgcgattgttaataatttctactaagtgtagatttttttnnnnnnnnnnaagcttggcgtggatccgatatcaactagatcttgagacaaatggcagtattcatccacaattttaaaagaaaaggggggattggggggtacagtgcaggggaaagaatagtagacataatagcaacagacatacaaactaaag

SEQ ID NO: 18749 - DNA, 301 bp, Artificial Sequence
  Pole.1_NTC.48
  crRNA array
  misc_feature (148)..(157): n is a, c, g, or t
cttggctttatatatcttgtggaaaggacgaaacaccgtaatttctactaagtgtagatgcgcgctctccacgtgctcttaatttctactaagtgtagatcggtcgactacggctgttagtaatttctactaagtgtagatttttttnnnnnnnnnnaagcttggcgtggatccgatatcaactagatcttgagacaaatggcagtattcatccacaattttaaaagaaaaggggggattggggggtacagtgcaggggaaagaatagtagacataatagcaacagacatacaaactaaag

SEQ ID NO: 18750 - DNA, 301 bp, Artificial Sequence
  Pole.1_NTC.49
  crRNA array
  misc_feature (148)..(157): n is a, c, g, or t
cttggctttatatatcttgtggaaaggacgaaacaccgtaatttctactaagtgtagatgcgcgctctccacgtgctcttaatttctactaagtgtagattcggggcgcgtcaactgaattaatttctactaagtgtagatttttttnnnnnnnnnnaagcttggcgtggatccgatatcaactagatcttgagacaaatggcagtattcatccacaattttaaaagaaaaggggggattggggggtacagtgcaggggaaagaatagtagacataatagcaacagacatacaaactaaag

SEQ ID NO: 18751 - DNA, 301 bp, Artificial Sequence
  Pole.1_NTC.5
  crRNA array
  misc_feature (148)..(157): n is a, c, g, or t
cttggctttatatatcttgtggaaaggacgaaacaccgtaatttctactaagtgtagatgcgcgctctccacgtgctcttaatttctactaagtgtagatgcttacgcgtcgcgaatgtataatttctactaagtgtagatttttttnnnnnnnnnnaagcttggcgtggatccgatatcaactagatcttgagacaaatggcagtattcatccacaattttaaaagaaaaggggggattggggggtacagtgcaggggaaagaatagtagacataatagcaacagacatacaaactaaag

SEQ ID NO: 18752 - DNA, 301 bp, Artificial Sequence
  Pole.1_NTC.50
  crRNA array
  misc_feature (148)..(157): n is a, c, g, or t
cttggctttatatatcttgtggaaaggacgaaacaccgtaatttctactaagtgtagatgcgcgctctccacgtgctcttaatttctactaagtgtagatattgccgctcgcgcaaaatctaatttctactaagtgtagatttttttnnnnnnnnnnaagcttggcgtggatccgatatcaactagatcttgagacaaatggcagtattcatccacaattttaaaagaaaaggggggattggggggtacagtgcaggggaaagaatagtagacataatagcaacagacatacaaactaaag

SEQ ID NO: 18753 - DNA, 301 bp, Artificial Sequence
  Pole.1_NTC.51
  crRNA array
  misc_feature (148)..(157): n is a, c, g, or t
cttggctttatatatcttgtggaaaggacgaaacaccgtaatttctactaagtgtagatgcgcgctctccacgtgctcttaatttctactaagtgtagattaacgcgcaacacgccaatgtaatttctactaagtgtagatttttttnnnnnnnnnnaagcttggcgtggatccgatatcaactagatcttgagacaaatggcagtattcatccacaattttaaaagaaaaggggggattggggggtacagtgcaggggaaagaatagtagacataatagcaacagacatacaaactaaag

SEQ ID NO: 18754 - DNA, 301 bp, Artificial Sequence
  Pole.1_NTC.6
  crRNA array
  misc_feature (148)..(157): n is a, c, g, or t
cttggctttatatatcttgtggaaaggacgaaacaccgtaatttctactaagtgtagatgcgcgctctccacgtgctcttaatttctactaagtgtagatcgaatcgcgcctacgggaattaatttctactaagtgtagatttttttnnnnnnnnnnaagcttggcgtggatccgatatcaactagatcttgagacaaatggcagtattcatccacaattttaaaagaaaaggggggattggggggtacagtgcaggggaaagaatagtagacataatagcaacagacatacaaactaaag

SEQ ID NO: 18755 - DNA, 301 bp, Artificial Sequence
  Pole.1_NTC.7
  crRNA array
  misc_feature (148)..(157): n is a, c, g, or t
cttggctttatatatcttgtggaaaggacgaaacaccgtaatttctactaagtgtagatgcgcgctctccacgtgctcttaatttctactaagtgtagatcgccgaacggataagactattaatttctactaagtgtagatttttttnnnnnnnnnnaagcttggcgtggatccgatatcaactagatcttgagacaaatggcagtattcatccacaattttaaaagaaaaggggggattggggggtacagtgcaggggaaagaatagtagacataatagcaacagacatacaaactaaag

SEQ ID NO: 18756 - DNA, 301 bp, Artificial Sequence
  Pole.1_NTC.8
  crRNA array
  misc_feature (148)..(157): n is a, c, g, or t
cttggctttatatatcttgtggaaaggacgaaacaccgtaatttctactaagtgtagatgcgcgctctccacgtgctcttaatttctactaagtgtagatcgaccgaggttacgctgggataatttctactaagtgtagatttttttnnnnnnnnnnaagcttggcgtggatccgatatcaactagatcttgagacaaatggcagtattcatccacaattttaaaagaaaaggggggattggggggtacagtgcaggggaaagaatagtagacataatagcaacagacatacaaactaaag

SEQ ID NO: 18757 - DNA, 301 bp, Artificial Sequence
  Pole.1_NTC.9
  crRNA array
  misc_feature (148)..(157): n is a, c, g, or t
cttggctttatatatcttgtggaaaggacgaaacaccgtaatttctactaagtgtagatgcgcgctctccacgtgctcttaatttctactaagtgtagatatcgccgtacggctatggcataatttctactaagtgtagatttttttnnnnnnnnnnaagcttggcgtggatccgatatcaactagatcttgagacaaatggcagtattcatccacaattttaaaagaaaaggggggattggggggtacagtgcaggggaaagaatagtagacataatagcaacagacatacaaactaaag

SEQ ID NO: 18758 - DNA, 301 bp, Artificial Sequence
  Pole.2_NTC.0
  crRNA array
  misc_feature (148)..(157): n is a, c, g, or t
cttggctttatatatcttgtggaaaggacgaaacaccgtaatttctactaagtgtagatacatcgagacgaccaaactgtaatttctactaagtgtagattatagcgtcgcgcgctaatttaatttctactaagtgtagatttttttnnnnnnnnnnaagcttggcgtggatccgatatcaactagatcttgagacaaatggcagtattcatccacaattttaaaagaaaaggggggattggggggtacagtgcaggggaaagaatagtagacataatagcaacagacatacaaactaaag

SEQ ID NO: 18759 - DNA, 301 bp, Artificial Sequence
  Pole.2_NTC.1
  crRNA array
  misc_feature (148)..(157): n is a, c, g, or t
cttggctttatatatcttgtggaaaggacgaaacaccgtaatttctactaagtgtagatacatcgagacgaccaaactgtaatttctactaagtgtagatcgcgtaaccgttccggctcctaatttctactaagtgtagatttttttnnnnnnnnnnaagcttggcgtggatccgatatcaactagatcttgagacaaatggcagtattcatccacaattttaaaagaaaaggggggattggggggtacagtgcaggggaaagaatagtagacataatagcaacagacatacaaactaaag

SEQ ID NO: 18760 - DNA, 301 bp, Artificial Sequence
  Pole.2_NTC.10
  crRNA array
  misc_feature (148)..(157): n is a, c, g, or t
cttggctttatatatcttgtggaaaggacgaaacaccgtaatttctactaagtgtagatacatcgagacgaccaaactgtaatttctactaagtgtagatcgctaagttcgcgcgggccgtaatttctactaagtgtagatttttttnnnnnnnnnnaagcttggcgtggatccgatatcaactagatcttgagacaaatggcagtattcatccacaattttaaaagaaaaggggggattggggggtacagtgcaggggaaagaatagtagacataatagcaacagacatacaaactaaag

SEQ ID NO: 18761 - DNA, 301 bp, Artificial Sequence
  Pole.2_NTC.11
  crRNA array
  misc_feature (148)..(157): n is a, c, g, or t
cttggctttatatatcttgtggaaaggacgaaacaccgtaatttctactaagtgtagatacatcgagacgaccaaactgtaatttctactaagtgtagatcgttcgtcgacgaagcaatctaatttctactaagtgtagatttttttnnnnnnnnnnaagcttggcgtggatccgatatcaactagatcttgagacaaatggcagtattcatccacaattttaaaagaaaaggggggattggggggtacagtgcaggggaaagaatagtagacataatagcaacagacatacaaactaaag

SEQ ID NO: 18762 - DNA, 301 bp, Artificial Sequence
  Pole.2_NTC.12
  crRNA array
  misc_feature (148)..(157): n is a, c, g, or t
cttggctttatatatcttgtggaaaggacgaaacaccgtaatttctactaagtgtagatacatcgagacgaccaaactgtaatttctactaagtgtagatcgccgacgattaatcaatagtaatttctactaagtgtagatttttttnnnnnnnnnnaagcttggcgtggatccgatatcaactagatcttgagacaaatggcagtattcatccacaattttaaaagaaaaggggggattggggggtacagtgcaggggaaagaatagtagacataatagcaacagacatacaaactaaag

SEQ ID NO: 18763 - DNA, 301 bp, Artificial Sequence
  Pole.2_NTC.13
  crRNA array
  misc_feature (148)..(157): n is a, c, g, or t
cttggctttatatatcttgtggaaaggacgaaacaccgtaatttctactaagtgtagatacatcgagacgaccaaactgtaatttctactaagtgtagatgaccgttgtatcgcgatcaataatttctactaagtgtagatttttttnnnnnnnnnnaagcttggcgtggatccgatatcaactagatcttgagacaaatggcagtattcatccacaattttaaaagaaaaggggggattggggggtacagtgcaggggaaagaatagtagacataatagcaacagacatacaaactaaag

SEQ ID NO: 18764 - DNA, 301 bp, Artificial Sequence
  Pole.2_NTC.14
  crRNA array
  misc_feature (148)..(157): n is a, c, g, or t
cttggctttatatatcttgtggaaaggacgaaacaccgtaatttctactaagtgtagatacatcgagacgaccaaactgtaatttctactaagtgtagatccgttcgtgcgatagtgttttaatttctactaagtgtagatttttttnnnnnnnnnnaagcttggcgtggatccgatatcaactagatcttgagacaaatggcagtattcatccacaattttaaaagaaaaggggggattggggggtacagtgcaggggaaagaatagtagacataatagcaacagacatacaaactaaag

SEQ ID NO: 18765 - DNA, 301 bp, Artificial Sequence
  Pole.2_NTC.15
  crRNA array
  misc_feature (148)..(157): n is a, c, g, or t
cttggctttatatatcttgtggaaaggacgaaacaccgtaatttctactaagtgtagatacatcgagacgaccaaactgtaatttctactaagtgtagatgttgtcgtgccgcgaatttataatttctactaagtgtagatttttttnnnnnnnnnnaagcttggcgtggatccgatatcaactagatcttgagacaaatggcagtattcatccacaattttaaaagaaaaggggggattggggggtacagtgcaggggaaagaatagtagacataatagcaacagacatacaaactaaag

SEQ ID NO: 18766 - DNA, 301 bp, Artificial Sequence
  Pole.2_NTC.16
  crRNA array
  misc_feature (148)..(157): n is a, c, g, or t
cttggctttatatatcttgtggaaaggacgaaacaccgtaatttctactaagtgtagatacatcgagacgaccaaactgtaatttctactaagtgtagatcggtacgttagacgaaaatttaatttctactaagtgtagatttttttnnnnnnnnnnaagcttggcgtggatccgatatcaactagatcttgagacaaatggcagtattcatccacaattttaaaagaaaaggggggattggggggtacagtgcaggggaaagaatagtagacataatagcaacagacatacaaactaaag

SEQ ID NO: 18767 - DNA, 301 bp, Artificial Sequence
  Pole.2_NTC.17
  crRNA array
  misc_feature (148)..(157): n is a, c, g, or t
cttggctttatatatcttgtggaaaggacgaaacaccgtaatttctactaagtgtagatacatcgagacgaccaaactgtaatttctactaagtgtagattatcgaacgctatcgaacgttaatttctactaagtgtagatttttttnnnnnnnnnnaagcttggcgtggatccgatatcaactagatcttgagacaaatggcagtattcatccacaattttaaaagaaaaggggggattggggggtacagtgcaggggaaagaatagtagacataatagcaacagacatacaaactaaag

SEQ ID NO: 18768 - DNA, 301 bp, Artificial Sequence
  Pole.2_NTC.18
  crRNA array
  misc_feature (148)..(157): n is a, c, g, or t
cttggctttatatatcttgtggaaaggacgaaacaccgtaatttctactaagtgtagatacatcgagacgaccaaactgtaatttctactaagtgtagattccggttacgaccggcaaaataatttctactaagtgtagatttttttnnnnnnnnnnaagcttggcgtggatccgatatcaactagatcttgagacaaatggcagtattcatccacaattttaaaagaaaaggggggattggggggtacagtgcaggggaaagaatagtagacataatagcaacagacatacaaactaaag

SEQ ID NO: 18769 - DNA, 301 bp, Artificial Sequence
  Pole.2_NTC.19
  crRNA array
  misc_feature (148)..(157): n is a, c, g, or t
cttggctttatatatcttgtggaaaggacgaaacaccgtaatttctactaagtgtagatacatcgagacgaccaaactgtaatttctactaagtgtagatcgtcgtagaacgatacccgataatttctactaagtgtagatttttttnnnnnnnnnnaagcttggcgtggatccgatatcaactagatcttgagacaaatggcagtattcatccacaattttaaaagaaaaggggggattggggggtacagtgcaggggaaagaatagtagacataatagcaacagacatacaaactaaag

SEQ ID NO: 18770 - DNA, 301 bp, Artificial Sequence
  Pole.2_NTC.2
  crRNA array
  misc_feature (148)..(157): n is a, c, g, or t
cttggctttatatatcttgtggaaaggacgaaacaccgtaatttctactaagtgtagatacatcgagacgaccaaactgtaatttctactaagtgtagatttatgtcgcgccgcgacccgtaatttctactaagtgtagatttttttnnnnnnnnnnaagcttggcgtggatccgatatcaactagatcttgagacaaatggcagtattcatccacaattttaaaagaaaaggggggattggggggtacagtgcaggggaaagaatagtagacataatagcaacagacatacaaactaaag

SEQ ID NO: 18771 - DNA, 301 bp, Artificial Sequence
  Pole.2_NTC.20
  crRNA array
  misc_feature (148)..(157): n is a, c, g, or t
cttggctttatatatcttgtggaaaggacgaaacaccgtaatttctactaagtgtagatacatcgagacgaccaaactgtaatttctactaagtgtagatattccggcgcgaccagaagataatttctactaagtgtagatttttttnnnnnnnnnnaagcttggcgtggatccgatatcaactagatcttgagacaaatggcagtattcatccacaattttaaaagaaaaggggggattggggggtacagtgcaggggaaagaatagtagacataatagcaacagacatacaaactaaag

SEQ ID NO: 18772 - DNA, 301 bp, Artificial Sequence
  Pole.2_NTC.21
  crRNA array
  misc_feature (148)..(157): n is a, c, g, or t
cttggctttatatatcttgtggaaaggacgaaacaccgtaatttctactaagtgtagatacatcgagacgaccaaactgtaatttctactaagtgtagatgtataacttcgcgcggtccgtaatttctactaagtgtagatttttttnnnnnnnnnnaagcttggcgtggatccgatatcaactagatcttgagacaaatggcagtattcatccacaattttaaaagaaaaggggggattggggggtacagtgcaggggaaagaatagtagacataatagcaacagacatacaaactaaag

SEQ ID NO: 18773 - DNA, 301 bp, Artificial Sequence
  Pole.2_NTC.22
  crRNA array
  misc_feature (148)..(157): n is a, c, g, or t
cttggctttatatatcttgtggaaaggacgaaacaccgtaatttctactaagtgtagatacatcgagacgaccaaactgtaatttctactaagtgtagatgcgcgtcaacgtaatgtgcctaatttctactaagtgtagatttttttnnnnnnnnnnaagcttggcgtggatccgatatcaactagatcttgagacaaatggcagtattcatccacaattttaaaagaaaaggggggattggggggtacagtgcaggggaaagaatagtagacataatagcaacagacatacaaactaaag

SEQ ID NO: 18774 - DNA, 301 bp, Artificial Sequence
  Pole.2_NTC.23
  crRNA array
  misc_feature (148)..(157): n is a, c, g, or t
cttggctttatatatcttgtggaaaggacgaaacaccgtaatttctactaagtgtagatacatcgagacgaccaaactgtaatttctactaagtgtagatacgcgctattatcgtaggtgtaatttctactaagtgtagatttttttnnnnnnnnnnaagcttggcgtggatccgatatcaactagatcttgagacaaatggcagtattcatccacaattttaaaagaaaaggggggattggggggtacagtgcaggggaaagaatagtagacataatagcaacagacatacaaactaaag

SEQ ID NO: 18775 - DNA, 301 bp, Artificial Sequence
  Pole.2_NTC.24
  crRNA array
  misc_feature (148)..(157): n is a, c, g, or t
cttggctttatatatcttgtggaaaggacgaaacaccgtaatttctactaagtgtagatacatcgagacgaccaaactgtaatttctactaagtgtagatactatcgacgttcgtcccggtaatttctactaagtgtagatttttttnnnnnnnnnnaagcttggcgtggatccgatatcaactagatcttgagacaaatggcagtattcatccacaattttaaaagaaaaggggggattggggggtacagtgcaggggaaagaatagtagacataatagcaacagacatacaaactaaag

SEQ ID NO: 18776 - DNA, 301 bp, Artificial Sequence
  Pole.2_NTC.25
  crRNA array
  misc_feature (148)..(157): n is a, c, g, or t
cttggctttatatatcttgtggaaaggacgaaacaccgtaatttctactaagtgtagatacatcgagacgaccaaactgtaatttctactaagtgtagattcgcgttatcgtgccgtgcgtaatttctactaagtgtagatttttttnnnnnnnnnnaagcttggcgtggatccgatatcaactagatcttgagacaaatggcagtattcatccacaattttaaaagaaaaggggggattggggggtacagtgcaggggaaagaatagtagacataatagcaacagacatacaaactaaag

SEQ ID NO: 18777 - DNA, 301 bp, Artificial Sequence
  Pole.2_NTC.26
  crRNA array
  misc_feature (148)..(157): n is a, c, g, or t
cttggctttatatatcttgtggaaaggacgaaacaccgtaatttctactaagtgtagatacatcgagacgaccaaactgtaatttctactaagtgtagatcgcgacggcggttttaacactaatttctactaagtgtagatttttttnnnnnnnnnnaagcttggcgtggatccgatatcaactagatcttgagacaaatggcagtattcatccacaattttaaaagaaaaggggggattggggggtacagtgcaggggaaagaatagtagacataatagcaacagacatacaaactaaag

SEQ ID NO: 18778 - DNA, 301 bp, Artificial Sequence
  Pole.2_NTC.27
  crRNA array
  misc_feature (148)..(157): n is a, c, g, or t
cttggctttatatatcttgtggaaaggacgaaacaccgtaatttctactaagtgtagatacatcgagacgaccaaactgtaatttctactaagtgtagatgtcgcgttgcgaccggcgcttaatttctactaagtgtagatttttttnnnnnnnnnnaagcttggcgtggatccgatatcaactagatcttgagacaaatggcagtattcatccacaattttaaaagaaaaggggggattggggggtacagtgcaggggaaagaatagtagacataatagcaacagacatacaaactaaag

SEQ ID NO: 18779 - DNA, 301 bp, Artificial Sequence
  Pole.2_NTC.28
  crRNA array
  misc_feature (148)..(157): n is a, c, g, or t
cttggctttatatatcttgtggaaaggacgaaacaccgtaatttctactaagtgtagatacatcgagacgaccaaactgtaatttctactaagtgtagataccgctaatcggcgtaaacttaatttctactaagtgtagatttttttnnnnnnnnnnaagcttggcgtggatccgatatcaactagatcttgagacaaatggcagtattcatccacaattttaaaagaaaaggggggattggggggtacagtgcaggggaaagaatagtagacataatagcaacagacatacaaactaaag

SEQ ID NO: 18780 - DNA, 301 bp, Artificial Sequence
  Pole.2_NTC.29
  crRNA array
  misc_feature (148)..(157): n is a, c, g, or t
cttggctttatatatcttgtggaaaggacgaaacaccgtaatttctactaagtgtagatacatcgagacgaccaaactgtaatttctactaagtgtagatcgcgatctataccgtctatataatttctactaagtgtagatttttttnnnnnnnnnnaagcttggcgtggatccgatatcaactagatcttgagacaaatggcagtattcatccacaattttaaaagaaaaggggggattggggggtacagtgcaggggaaagaatagtagacataatagcaacagacatacaaactaaag

SEQ ID NO: 18781 - DNA, 301 bp, Artificial Sequence
  Pole.2_NTC.3
  crRNA array
  misc_feature (148)..(157): n is a, c, g, or t
cttggctttatatatcttgtggaaaggacgaaacaccgtaatttctactaagtgtagatacatcgagacgaccaaactgtaatttctactaagtgtagattcgacgcgagacgacgtacataatttctactaagtgtagatttttttnnnnnnnnnnaagcttggcgtggatccgatatcaactagatcttgagacaaatggcagtattcatccacaattttaaaagaaaaggggggattggggggtacagtgcaggggaaagaatagtagacataatagcaacagacatacaaactaaag

SEQ ID NO: 18782 - DNA, 301 bp, Artificial Sequence
  Pole.2_NTC.30
  crRNA array
  misc_feature (148)..(157): n is a, c, g, or t
cttggctttatatatcttgtggaaaggacgaaacaccgtaatttctactaagtgtagatacatcgagacgaccaaactgtaatttctactaagtgtagatcgatcgtacgggtgtcctaataatttctactaagtgtagatttttttnnnnnnnnnnaagcttggcgtggatccgatatcaactagatcttgagacaaatggcagtattcatccacaattttaaaagaaaaggggggattggggggtacagtgcaggggaaagaatagtagacataatagcaacagacatacaaactaaag

SEQ ID NO: 18783 - DNA, 301 bp, Artificial Sequence
  Pole.2_NTC.31
  crRNA array
  misc_feature (148)..(157): n is a, c, g, or t
cttggctttatatatcttgtggaaaggacgaaacaccgtaatttctactaagtgtagatacatcgagacgaccaaactgtaatttctactaagtgtagatgccgaccgcgtgattgtaggtaatttctactaagtgtagatttttttnnnnnnnnnnaagcttggcgtggatccgatatcaactagatcttgagacaaatggcagtattcatccacaattttaaaagaaaaggggggattggggggtacagtgcaggggaaagaatagtagacataatagcaacagacatacaaactaaag

SEQ ID NO: 18784 - DNA, 301 bp, Artificial Sequence
  Pole.2_NTC.32
  crRNA array
  misc_feature (148)..(157): n is a, c, g, or t
cttggctttatatatcttgtggaaaggacgaaacaccgtaatttctactaagtgtagatacatcgagacgaccaaactgtaatttctactaagtgtagatgcacgttacgcccgggtcactaatttctactaagtgtagatttttttnnnnnnnnnnaagcttggcgtggatccgatatcaactagatcttgagacaaatggcagtattcatccacaattttaaaagaaaaggggggattggggggtacagtgcaggggaaagaatagtagacataatagcaacagacatacaaactaaag

SEQ ID NO: 18785 - DNA, 301 bp, Artificial Sequence
  Pole.2_NTC.33
  crRNA array
  misc_feature (148)..(157): n is a, c, g, or t
cttggctttatatatcttgtggaaaggacgaaacaccgtaatttctactaagtgtagatacatcgagacgaccaaactgtaatttctactaagtgtagattaagcgaccgacgcattcgctaatttctactaagtgtagatttttttnnnnnnnnnnaagcttggcgtggatccgatatcaactagatcttgagacaaatggcagtattcatccacaattttaaaagaaaaggggggattggggggtacagtgcaggggaaagaatagtagacataatagcaacagacatacaaactaaag

SEQ ID NO: 18786 - DNA, 301 bp, Artificial Sequence
  Pole.2_NTC.34
  crRNA array
  misc_feature (148)..(157): n is a, c, g, or t
cttggctttatatatcttgtggaaaggacgaaacaccgtaatttctactaagtgtagatacatcgagacgaccaaactgtaatttctactaagtgtagattagcgttcgacacgtgaaactaatttctactaagtgtagatttttttnnnnnnnnnnaagcttggcgtggatccgatatcaactagatcttgagacaaatggcagtattcatccacaattttaaaagaaaaggggggattggggggtacagtgcaggggaaagaatagtagacataatagcaacagacatacaaactaaag

SEQ ID NO: 18787 - DNA, 301 bp, Artificial Sequence
  Pole.2_NTC.35
  crRNA array
  misc_feature (148)..(157): n is a, c, g, or t
cttggctttatatatcttgtggaaaggacgaaacaccgtaatttctactaagtgtagatacatcgagacgaccaaactgtaatttctactaagtgtagattggcgcgtaatcgctattcgtaatttctactaagtgtagatttttttnnnnnnnnnnaagcttggcgtggatccgatatcaactagatcttgagacaaatggcagtattcatccacaattttaaaagaaaaggggggattggggggtacagtgcaggggaaagaatagtagacataatagcaacagacatacaaactaaag

SEQ ID NO: 18788 - DNA, 301 bp, Artificial Sequence
  Pole.2_NTC.36
  crRNA array
  misc_feature (148)..(157): n is a, c, g, or t
cttggctttatatatcttgtggaaaggacgaaacaccgtaatttctactaagtgtagatacatcgagacgaccaaactgtaatttctactaagtgtagatcaacccgccgtagcgggccttaatttctactaagtgtagatttttttnnnnnnnnnnaagcttggcgtggatccgatatcaactagatcttgagacaaatggcagtattcatccacaattttaaaagaaaaggggggattggggggtacagtgcaggggaaagaatagtagacataatagcaacagacatacaaactaaag

SEQ ID NO: 18789 - DNA, 301 bp, Artificial Sequence
  Pole.2_NTC.37
  crRNA array
  misc_feature (148)..(157): n is a, c, g, or t
cttggctttatatatcttgtggaaaggacgaaacaccgtaatttctactaagtgtagatacatcgagacgaccaaactgtaatttctactaagtgtagattttgcgttgacgcgattacttaatttctactaagtgtagatttttttnnnnnnnnnnaagcttggcgtggatccgatatcaactagatcttgagacaaatggcagtattcatccacaattttaaaagaaaaggggggattggggggtacagtgcaggggaaagaatagtagacataatagcaacagacatacaaactaaag

SEQ ID NO: 18790 - DNA, 301 bp, Artificial Sequence
  Pole.2_NTC.38
  crRNA array
  misc_feature (148)..(157): n is a, c, g, or t
cttggctttatatatcttgtggaaaggacgaaacaccgtaatttctactaagtgtagatacatcgagacgaccaaactgtaatttctactaagtgtagataacggagcgcgatactaccataatttctactaagtgtagatttttttnnnnnnnnnnaagcttggcgtggatccgatatcaactagatcttgagacaaatggcagtattcatccacaattttaaaagaaaaggggggattggggggtacagtgcaggggaaagaatagtagacataatagcaacagacatacaaactaaag

SEQ ID NO: 18791 - DNA, 301 bp, Artificial Sequence
  Pole.2_NTC.39
  crRNA array
  misc_feature (148)..(157): n is a, c, g, or t
cttggctttatatatcttgtggaaaggacgaaacaccgtaatttctactaagtgtagatacatcgagacgaccaaactgtaatttctactaagtgtagatccggacgttataacgtttcttaatttctactaagtgtagatttttttnnnnnnnnnnaagcttggcgtggatccgatatcaactagatcttgagacaaatggcagtattcatccacaattttaaaagaaaaggggggattggggggtacagtgcaggggaaagaatagtagacataatagcaacagacatacaaactaaag

SEQ ID NO: 18792 - DNA, 301 bp, Artificial Sequence
  Pole.2_NTC.4
  crRNA array
  misc_feature (148)..(157): n is a, c, g, or t
cttggctttatatatcttgtggaaaggacgaaacaccgtaatttctactaagtgtagatacatcgagacgaccaaactgtaatttctactaagtgtagatatacccgtcgcgaacgtgagtaatttctactaagtgtagatttttttnnnnnnnnnnaagcttggcgtggatccgatatcaactagatcttgagacaaatggcagtattcatccacaattttaaaagaaaaggggggattggggggtacagtgcaggggaaagaatagtagacataatagcaacagacatacaaactaaag

SEQ ID NO: 18793 - DNA, 301 bp, Artificial Sequence
  Pole.2_NTC.40
  crRNA array
  misc_feature (148)..(157): n is a, c, g, or t
cttggctttatatatcttgtggaaaggacgaaacaccgtaatttctactaagtgtagatacatcgagacgaccaaactgtaatttctactaagtgtagatattcgcgaacccggccggaataatttctactaagtgtagatttttttnnnnnnnnnnaagcttggcgtggatccgatatcaactagatcttgagacaaatggcagtattcatccacaattttaaaagaaaaggggggattggggggtacagtgcaggggaaagaatagtagacataatagcaacagacatacaaactaaag

SEQ ID NO: 18794 - DNA, 301 bp, Artificial Sequence
  Pole.2_NTC.41
  crRNA array
  misc_feature (148)..(157): n is a, c, g, or t
cttggctttatatatcttgtggaaaggacgaaacaccgtaatttctactaagtgtagatacatcgagacgaccaaactgtaatttctactaagtgtagatttgatggcgcgacgcgttattaatttctactaagtgtagatttttttnnnnnnnnnnaagcttggcgtggatccgatatcaactagatcttgagacaaatggcagtattcatccacaattttaaaagaaaaggggggattggggggtacagtgcaggggaaagaatagtagacataatagcaacagacatacaaactaaag

SEQ ID NO: 18795 - DNA, 301 bp, Artificial Sequence
  Pole.2_NTC.42
  crRNA array
  misc_feature (148)..(157): n is a, c, g, or t
cttggctttatatatcttgtggaaaggacgaaacaccgtaatttctactaagtgtagatacatcgagacgaccaaactgtaatttctactaagtgtagatggtcaaatcgcggcgataactaatttctactaagtgtagatttttttnnnnnnnnnnaagcttggcgtggatccgatatcaactagatcttgagacaaatggcagtattcatccacaattttaaaagaaaaggggggattggggggtacagtgcaggggaaagaatagtagacataatagcaacagacatacaaactaaag

SEQ ID NO: 18796 - DNA, 301 bp, Artificial Sequence
  Pole.2_NTC.43
  crRNA array
  misc_feature (148)..(157): n is a, c, g, or t
cttggctttatatatcttgtggaaaggacgaaacaccgtaatttctactaagtgtagatacatcgagacgaccaaactgtaatttctactaagtgtagatcgactcgcgcattgaactggtaatttctactaagtgtagatttttttnnnnnnnnnnaagcttggcgtggatccgatatcaactagatcttgagacaaatggcagtattcatccacaattttaaaagaaaaggggggattggggggtacagtgcaggggaaagaatagtagacataatagcaacagacatacaaactaaag

SEQ ID NO: 18797 - DNA, 301 bp, Artificial Sequence
  Pole.2_NTC.44
  crRNA array
  misc_feature (148)..(157): n is a, c, g, or t
cttggctttatatatcttgtggaaaggacgaaacaccgtaatttctactaagtgtagatacatcgagacgaccaaactgtaatttctactaagtgtagatagcgtcgtacgatttatcgttaatttctactaagtgtagatttttttnnnnnnnnnnaagcttggcgtggatccgatatcaactagatcttgagacaaatggcagtattcatccacaattttaaaagaaaaggggggattggggggtacagtgcaggggaaagaatagtagacataatagcaacagacatacaaactaaag

SEQ ID NO: 18798 - DNA, 301 bp, Artificial Sequence
  Pole.2_NTC.45
  crRNA array
  misc_feature (148)..(157): n is a, c, g, or t
cttggctttatatatcttgtggaaaggacgaaacaccgtaatttctactaagtgtagatacatcgagacgaccaaactgtaatttctactaagtgtagatcggaacgcgtgatactagggtaatttctactaagtgtagatttttttnnnnnnnnnnaagcttggcgtggatccgatatcaactagatcttgagacaaatggcagtattcatccacaattttaaaagaaaaggggggattggggggtacagtgcaggggaaagaatagtagacataatagcaacagacatacaaactaaag

SEQ ID NO: 18799 - DNA, 301 bp, Artificial Sequence
  Pole.2_NTC.46
  crRNA array
  misc_feature (148)..(157): n is a, c, g, or t
cttggctttatatatcttgtggaaaggacgaaacaccgtaatttctactaagtgtagatacatcgagacgaccaaactgtaatttctactaagtgtagatagcgggtcgtagacgcgcggtaatttctactaagtgtagatttttttnnnnnnnnnnaagcttggcgtggatccgatatcaactagatcttgagacaaatggcagtattcatccacaattttaaaagaaaaggggggattggggggtacagtgcaggggaaagaatagtagacataatagcaacagacatacaaactaaag

SEQ ID NO: 18800 - DNA, 301 bp, Artificial Sequence
  Pole.2_NTC.47
  crRNA array
  misc_feature (148)..(157): n is a, c, g, or t
cttggctttatatatcttgtggaaaggacgaaacaccgtaatttctactaagtgtagatacatcgagacgaccaaactgtaatttctactaagtgtagattctcgtatcgcgattgttaataatttctactaagtgtagatttttttnnnnnnnnnnaagcttggcgtggatccgatatcaactagatcttgagacaaatggcagtattcatccacaattttaaaagaaaaggggggattggggggtacagtgcaggggaaagaatagtagacataatagcaacagacatacaaactaaag

SEQ ID NO: 18801 - DNA, 301 bp, Artificial Sequence
  Pole.2_NTC.48
  crRNA array
  misc_feature (148)..(157): n is a, c, g, or t
cttggctttatatatcttgtggaaaggacgaaacaccgtaatttctactaagtgtagatacatcgagacgaccaaactgtaatttctactaagtgtagatcggtcgactacggctgttagtaatttctactaagtgtagatttttttnnnnnnnnnnaagcttggcgtggatccgatatcaactagatcttgagacaaatggcagtattcatccacaattttaaaagaaaaggggggattggggggtacagtgcaggggaaagaatagtagacataatagcaacagacatacaaactaaag

SEQ ID NO: 18802 - DNA, 301 bp, Artificial Sequence
  Pole.2_NTC.49
  crRNA array
  misc_feature (148)..(157): n is a, c, g, or t
cttggctttatatatcttgtggaaaggacgaaacaccgtaatttctactaagtgtagatacatcgagacgaccaaactgtaatttctactaagtgtagattcggggcgcgtcaactgaattaatttctactaagtgtagatttttttnnnnnnnnnnaagcttggcgtggatccgatatcaactagatcttgagacaaatggcagtattcatccacaattttaaaagaaaaggggggattggggggtacagtgcaggggaaagaatagtagacataatagcaacagacatacaaactaaag

SEQ ID NO: 18803 - DNA, 301 bp, Artificial Sequence
  Pole.2_NTC.5
  crRNA array
  misc_feature (148)..(157): n is a, c, g, or t
cttggctttatatatcttgtggaaaggacgaaacaccgtaatttctactaagtgtagatacatcgagacgaccaaactgtaatttctactaagtgtagatgcttacgcgtcgcgaatgtataatttctactaagtgtagatttttttnnnnnnnnnnaagcttggcgtggatccgatatcaactagatcttgagacaaatggcagtattcatccacaattttaaaagaaaaggggggattggggggtacagtgcaggggaaagaatagtagacataatagcaacagacatacaaactaaag

SEQ ID NO: 18804 - DNA, 301 bp, Artificial Sequence
  Pole.2_NTC.50
  crRNA array
  misc_feature (148)..(157): n is a, c, g, or t
cttggctttatatatcttgtggaaaggacgaaacaccgtaatttctactaagtgtagatacatcgagacgaccaaactgtaatttctactaagtgtagatattgccgctcgcgcaaaatctaatttctactaagtgtagatttttttnnnnnnnnnnaagcttggcgtggatccgatatcaactagatcttgagacaaatggcagtattcatccacaattttaaaagaaaaggggggattggggggtacagtgcaggggaaagaatagtagacataatagcaacagacatacaaactaaag

SEQ ID NO: 18805 - DNA, 301 bp, Artificial Sequence
  Pole.2_NTC.51
  crRNA array
  misc_feature (148)..(157): n is a, c, g, or t
cttggctttatatatcttgtggaaaggacgaaacaccgtaatttctactaagtgtagatacatcgagacgaccaaactgtaatttctactaagtgtagattaacgcgcaacacgccaatgtaatttctactaagtgtagatttttttnnnnnnnnnnaagcttggcgtggatccgatatcaactagatcttgagacaaatggcagtattcatccacaattttaaaagaaaaggggggattggggggtacagtgcaggggaaagaatagtagacataatagcaacagacatacaaactaaag

SEQ ID NO: 18806 - DNA, 301 bp, Artificial Sequence
  Pole.2_NTC.6
  crRNA array
  misc_feature (148)..(157): n is a, c, g, or t
cttggctttatatatcttgtggaaaggacgaaacaccgtaatttctactaagtgtagatacatcgagacgaccaaactgtaatttctactaagtgtagatcgaatcgcgcctacgggaattaatttctactaagtgtagatttttttnnnnnnnnnnaagcttggcgtggatccgatatcaactagatcttgagacaaatggcagtattcatccacaattttaaaagaaaaggggggattggggggtacagtgcaggggaaagaatagtagacataatagcaacagacatacaaactaaag

SEQ ID NO: 18807 - DNA, 301 bp, Artificial Sequence
  Pole.2_NTC.7
  crRNA array
  misc_feature (148)..(157): n is a, c, g, or t
cttggctttatatatcttgtggaaaggacgaaacaccgtaatttctactaagtgtagatacatcgagacgaccaaactgtaatttctactaagtgtagatcgccgaacggataagactattaatttctactaagtgtagatttttttnnnnnnnnnnaagcttggcgtggatccgatatcaactagatcttgagacaaatggcagtattcatccacaattttaaaagaaaaggggggattggggggtacagtgcaggggaaagaatagtagacataatagcaacagacatacaaactaaag

SEQ ID NO: 18808 - DNA, 301 bp, Artificial Sequence
  Pole.2_NTC.8
  crRNA array
  misc_feature (148)..(157): n is a, c, g, or t
cttggctttatatatcttgtggaaaggacgaaacaccgtaatttctactaagtgtagatacatcgagacgaccaaactgtaatttctactaagtgtagatcgaccgaggttacgctgggataatttctactaagtgtagatttttttnnnnnnnnnnaagcttggcgtggatccgatatcaactagatcttgagacaaatggcagtattcatccacaattttaaaagaaaaggggggattggggggtacagtgcaggggaaagaatagtagacataatagcaacagacatacaaactaaag

SEQ ID NO: 18809 - DNA, 301 bp, Artificial Sequence
  Pole.2_NTC.9
  crRNA array
  misc_feature (148)..(157): n is a, c, g, or t
cttggctttatatatcttgtggaaaggacgaaacaccgtaatttctactaagtgtagatacatcgagacgaccaaactgtaatttctactaagtgtagatatcgccgtacggctatggcataatttctactaagtgtagatttttttnnnnnnnnnnaagcttggcgtggatccgatatcaactagatcttgagacaaatggcagtattcatccacaattttaaaagaaaaggggggattggggggtacagtgcaggggaaagaatagtagacataatagcaacagacatacaaactaaag

SEQ ID NO: 18810 - DNA, 301 bp, Artificial Sequence
  Pole.3_NTC.0
  crRNA array
  misc_feature (148)..(157): n is a, c, g, or t
cttggctttatatatcttgtggaaaggacgaaacaccgtaatttctactaagtgtagatctgctgcaacgagtcgagaataatttctactaagtgtagattatagcgtcgcgcgctaatttaatttctactaagtgtagatttttttnnnnnnnnnnaagcttggcgtggatccgatatcaactagatcttgagacaaatggcagtattcatccacaattttaaaagaaaaggggggattggggggtacagtgcaggggaaagaatagtagacataatagcaacagacatacaaactaaag

SEQ ID NO: 18811 - DNA, 301 bp, Artificial Sequence
  Pole.3_NTC.1
  crRNA array
  misc_feature (148)..(157): n is a, c, g, or t
cttggctttatatatcttgtggaaaggacgaaacaccgtaatttctactaagtgtagatctgctgcaacgagtcgagaataatttctactaagtgtagatcgcgtaaccgttccggctcctaatttctactaagtgtagatttttttnnnnnnnnnnaagcttggcgtggatccgatatcaactagatcttgagacaaatggcagtattcatccacaattttaaaagaaaaggggggattggggggtacagtgcaggggaaagaatagtagacataatagcaacagacatacaaactaaag

SEQ ID NO: 18812 - DNA, 301 bp, Artificial Sequence
  Pole.3_NTC.10
  crRNA array
  misc_feature (148)..(157): n is a, c, g, or t
cttggctttatatatcttgtggaaaggacgaaacaccgtaatttctactaagtgtagatctgctgcaacgagtcgagaataatttctactaagtgtagatcgctaagttcgcgcgggccgtaatttctactaagtgtagatttttttnnnnnnnnnnaagcttggcgtggatccgatatcaactagatcttgagacaaatggcagtattcatccacaattttaaaagaaaaggggggattggggggtacagtgcaggggaaagaatagtagacataatagcaacagacatacaaactaaag

SEQ ID NO: 18813 - DNA, 301 bp, Artificial Sequence
  Pole.3_NTC.11
  crRNA array
  misc_feature (148)..(157): n is a, c, g, or t
cttggctttatatatcttgtggaaaggacgaaacaccgtaatttctactaagtgtagatctgctgcaacgagtcgagaataatttctactaagtgtagatcgttcgtcgacgaagcaatctaatttctactaagtgtagatttttttnnnnnnnnnnaagcttggcgtggatccgatatcaactagatcttgagacaaatggcagtattcatccacaattttaaaagaaaaggggggattggggggtacagtgcaggggaaagaatagtagacataatagcaacagacatacaaactaaag

SEQ ID NO: 18814 - DNA, 301 bp, Artificial Sequence
  Pole.3_NTC.12
  crRNA array
  misc_feature (148)..(157): n is a, c, g, or t
cttggctttatatatcttgtggaaaggacgaaacaccgtaatttctactaagtgtagatctgctgcaacgagtcgagaataatttctactaagtgtagatcgccgacgattaatcaatagtaatttctactaagtgtagatttttttnnnnnnnnnnaagcttggcgtggatccgatatcaactagatcttgagacaaatggcagtattcatccacaattttaaaagaaaaggggggattggggggtacagtgcaggggaaagaatagtagacataatagcaacagacatacaaactaaag

SEQ ID NO: 18815 - DNA, 301 bp, Artificial Sequence
  Pole.3_NTC.13
  crRNA array
  misc_feature (148)..(157): n is a, c, g, or t
cttggctttatatatcttgtggaaaggacgaaacaccgtaatttctactaagtgtagatctgctgcaacgagtcgagaataatttctactaagtgtagatgaccgttgtatcgcgatcaataatttctactaagtgtagatttttttnnnnnnnnnnaagcttggcgtggatccgatatcaactagatcttgagacaaatggcagtattcatccacaattttaaaagaaaaggggggattggggggtacagtgcaggggaaagaatagtagacataatagcaacagacatacaaactaaag

SEQ ID NO: 18816 - DNA, 301 bp, Artificial Sequence
  Pole.3_NTC.14
  crRNA array
  misc_feature (148)..(157): n is a, c, g, or t
cttggctttatatatcttgtggaaaggacgaaacaccgtaatttctactaagtgtagatctgctgcaacgagtcgagaataatttctactaagtgtagatccgttcgtgcgatagtgttttaatttctactaagtgtagatttttttnnnnnnnnnnaagcttggcgtggatccgatatcaactagatcttgagacaaatggcagtattcatccacaattttaaaagaaaaggggggattggggggtacagtgcaggggaaagaatagtagacataatagcaacagacatacaaactaaag

SEQ ID NO: 18817 - DNA, 301 bp, Artificial Sequence
  Pole.3_NTC.15
  crRNA array
  misc_feature (148)..(157): n is a, c, g, or t
cttggctttatatatcttgtggaaaggacgaaacaccgtaatttctactaagtgtagatctgctgcaacgagtcgagaataatttctactaagtgtagatgttgtcgtgccgcgaatttataatttctactaagtgtagatttttttnnnnnnnnnnaagcttggcgtggatccgatatcaactagatcttgagacaaatggcagtattcatccacaattttaaaagaaaaggggggattggggggtacagtgcaggggaaagaatagtagacataatagcaacagacatacaaactaaag

SEQ ID NO: 18818 - DNA, 301 bp, Artificial Sequence
  Pole.3_NTC.16
  crRNA array
  misc_feature (148)..(157): n is a, c, g, or t
cttggctttatatatcttgtggaaaggacgaaacaccgtaatttctactaagtgtagatctgctgcaacgagtcgagaataatttctactaagtgtagatcggtacgttagacgaaaatttaatttctactaagtgtagatttttttnnnnnnnnnnaagcttggcgtggatccgatatcaactagatcttgagacaaatggcagtattcatccacaattttaaaagaaaaggggggattggggggtacagtgcaggggaaagaatagtagacataatagcaacagacatacaaactaaag

SEQ ID NO: 18819 - DNA, 301 bp, Artificial Sequence
  Pole.3_NTC.17
  crRNA array
  misc_feature (148)..(157): n is a, c, g, or t
cttggctttatatatcttgtggaaaggacgaaacaccgtaatttctactaagtgtagatctgctgcaacgagtcgagaataatttctactaagtgtagattatcgaacgctatcgaacgttaatttctactaagtgtagatttttttnnnnnnnnnnaagcttggcgtggatccgatatcaactagatcttgagacaaatggcagtattcatccacaattttaaaagaaaaggggggattggggggtacagtgcaggggaaagaatagtagacataatagcaacagacatacaaactaaag

SEQ ID NO: 18820 - DNA, 301 bp, Artificial Sequence
  Pole.3_NTC.18
  crRNA array
  misc_feature (148)..(157): n is a, c, g, or t
cttggctttatatatcttgtggaaaggacgaaacaccgtaatttctactaagtgtagatctgctgcaacgagtcgagaataatttctactaagtgtagattccggttacgaccggcaaaataatttctactaagtgtagatttttttnnnnnnnnnnaagcttggcgtggatccgatatcaactagatcttgagacaaatggcagtattcatccacaattttaaaagaaaaggggggattggggggtacagtgcaggggaaagaatagtagacataatagcaacagacatacaaactaaag

SEQ ID NO: 18821 - DNA, 301 bp, Artificial Sequence
  Pole.3_NTC.19
  crRNA array
  misc_feature (148)..(157): n is a, c, g, or t
cttggctttatatatcttgtggaaaggacgaaacaccgtaatttctactaagtgtagatctgctgcaacgagtcgagaataatttctactaagtgtagatcgtcgtagaacgatacccgataatttctactaagtgtagatttttttnnnnnnnnnnaagcttggcgtggatccgatatcaactagatcttgagacaaatggcagtattcatccacaattttaaaagaaaaggggggattggggggtacagtgcaggggaaagaatagtagacataatagcaacagacatacaaactaaag

SEQ ID NO: 18822 - DNA, 301 bp, Artificial Sequence
  Pole.3_NTC.2
  crRNA array
  misc_feature (148)..(157): n is a, c, g, or t
cttggctttatatatcttgtggaaaggacgaaacaccgtaatttctactaagtgtagatctgctgcaacgagtcgagaataatttctactaagtgtagatttatgtcgcgccgcgacccgtaatttctactaagtgtagatttttttnnnnnnnnnnaagcttggcgtggatccgatatcaactagatcttgagacaaatggcagtattcatccacaattttaaaagaaaaggggggattggggggtacagtgcaggggaaagaatagtagacataatagcaacagacatacaaactaaag

SEQ ID NO: 18823 - DNA, 301 bp, Artificial Sequence
  Pole.3_NTC.20
  crRNA array
  misc_feature (148)..(157): n is a, c, g, or t
cttggctttatatatcttgtggaaaggacgaaacaccgtaatttctactaagtgtagatctgctgcaacgagtcgagaataatttctactaagtgtagatattccggcgcgaccagaagataatttctactaagtgtagatttttttnnnnnnnnnnaagcttggcgtggatccgatatcaactagatcttgagacaaatggcagtattcatccacaattttaaaagaaaaggggggattggggggtacagtgcaggggaaagaatagtagacataatagcaacagacatacaaactaaag

SEQ ID NO: 18824 - DNA, 301 bp, Artificial Sequence
  Pole.3_NTC.21
  crRNA array
  misc_feature (148)..(157): n is a, c, g, or t
cttggctttatatatcttgtggaaaggacgaaacaccgtaatttctactaagtgtagatctgctgcaacgagtcgagaataatttctactaagtgtagatgtataacttcgcgcggtccgtaatttctactaagtgtagatttttttnnnnnnnnnnaagcttggcgtggatccgatatcaactagatcttgagacaaatggcagtattcatccacaattttaaaagaaaaggggggattggggggtacagtgcaggggaaagaatagtagacataatagcaacagacatacaaactaaag

SEQ ID NO: 18825 - DNA, 301 bp, Artificial Sequence
  Pole.3_NTC.22
  crRNA array
  misc_feature (148)..(157): n is a, c, g, or t
cttggctttatatatcttgtggaaaggacgaaacaccgtaatttctactaagtgtagatctgctgcaacgagtcgagaataatttctactaagtgtagatgcgcgtcaacgtaatgtgcctaatttctactaagtgtagatttttttnnnnnnnnnnaagcttggcgtggatccgatatcaactagatcttgagacaaatggcagtattcatccacaattttaaaagaaaaggggggattggggggtacagtgcaggggaaagaatagtagacataatagcaacagacatacaaactaaag

SEQ ID NO: 18826 - DNA, 301 bp, Artificial Sequence
  Pole.3_NTC.23
  crRNA array
  misc_feature (148)..(157): n is a, c, g, or t
cttggctttatatatcttgtggaaaggacgaaacaccgtaatttctactaagtgtagatctgctgcaacgagtcgagaataatttctactaagtgtagatacgcgctattatcgtaggtgtaatttctactaagtgtagatttttttnnnnnnnnnnaagcttggcgtggatccgatatcaactagatcttgagacaaatggcagtattcatccacaattttaaaagaaaaggggggattggggggtacagtgcaggggaaagaatagtagacataatagcaacagacatacaaactaaag

SEQ ID NO: 18827 - DNA, 301 bp, Artificial Sequence
  Pole.3_NTC.24
  crRNA array
  misc_feature (148)..(157): n is a, c, g, or t
cttggctttatatatcttgtggaaaggacgaaacaccgtaatttctactaagtgtagatctgctgcaacgagtcgagaataatttctactaagtgtagatactatcgacgttcgtcccggtaatttctactaagtgtagatttttttnnnnnnnnnnaagcttggcgtggatccgatatcaactagatcttgagacaaatggcagtattcatccacaattttaaaagaaaaggggggattggggggtacagtgcaggggaaagaatagtagacataatagcaacagacatacaaactaaag

SEQ ID NO: 18828 - DNA, 301 bp, Artificial Sequence
  Pole.3_NTC.25
  crRNA array
  misc_feature (148)..(157): n is a, c, g, or t
cttggctttatatatcttgtggaaaggacgaaacaccgtaatttctactaagtgtagatctgctgcaacgagtcgagaataatttctactaagtgtagattcgcgttatcgtgccgtgcgtaatttctactaagtgtagatttttttnnnnnnnnnnaagcttggcgtggatccgatatcaactagatcttgagacaaatggcagtattcatccacaattttaaaagaaaaggggggattggggggtacagtgcaggggaaagaatagtagacataatagcaacagacatacaaactaaag

SEQ ID NO: 18829 - DNA, 301 bp, Artificial Sequence
  Pole.3_NTC.26
  crRNA array
  misc_feature (148)..(157): n is a, c, g, or t
cttggctttatatatcttgtggaaaggacgaaacaccgtaatttctactaagtgtagatctgctgcaacgagtcgagaataatttctactaagtgtagatcgcgacggcggttttaacactaatttctactaagtgtagatttttttnnnnnnnnnnaagcttggcgtggatccgatatcaactagatcttgagacaaatggcagtattcatccacaattttaaaagaaaaggggggattggggggtacagtgcaggggaaagaatagtagacataatagcaacagacatacaaactaaag

SEQ ID NO: 18830 - DNA, 301 bp, Artificial Sequence
  Pole.3_NTC.27
  crRNA array
  misc_feature (148)..(157): n is a, c, g, or t
cttggctttatatatcttgtggaaaggacgaaacaccgtaatttctactaagtgtagatctgctgcaacgagtcgagaataatttctactaagtgtagatgtcgcgttgcgaccggcgcttaatttctactaagtgtagatttttttnnnnnnnnnnaagcttggcgtggatccgatatcaactagatcttgagacaaatggcagtattcatccacaattttaaaagaaaaggggggattggggggtacagtgcaggggaaagaatagtagacataatagcaacagacatacaaactaaag

SEQ ID NO: 18831 - DNA, 301 bp, Artificial Sequence
  Pole.3_NTC.28
  crRNA array
  misc_feature (148)..(157): n is a, c, g, or t
cttggctttatatatcttgtggaaaggacgaaacaccgtaatttctactaagtgtagatctgctgcaacgagtcgagaataatttctactaagtgtagataccgctaatcggcgtaaacttaatttctactaagtgtagatttttttnnnnnnnnnnaagcttggcgtggatccgatatcaactagatcttgagacaaatggcagtattcatccacaattttaaaagaaaaggggggattggggggtacagtgcaggggaaagaatagtagacataatagcaacagacatacaaactaaag

SEQ ID NO: 18832 - DNA, 301 bp, Artificial Sequence
  Pole.3_NTC.29
  crRNA array
  misc_feature (148)..(157): n is a, c, g, or t
cttggctttatatatcttgtggaaaggacgaaacaccgtaatttctactaagtgtagatctgctgcaacgagtcgagaataatttctactaagtgtagatcgcgatctataccgtctatataatttctactaagtgtagatttttttnnnnnnnnnnaagcttggcgtggatccgatatcaactagatcttgagacaaatggcagtattcatccacaattttaaaagaaaaggggggattggggggtacagtgcaggggaaagaatagtagacataatagcaacagacatacaaactaaag

SEQ ID NO: 18833 - DNA, 301 bp, Artificial Sequence
  Pole.3_NTC.3
  crRNA array
  misc_feature (148)..(157): n is a, c, g, or t
cttggctttatatatcttgtggaaaggacgaaacaccgtaatttctactaagtgtagatctgctgcaacgagtcgagaataatttctactaagtgtagattcgacgcgagacgacgtacataatttctactaagtgtagatttttttnnnnnnnnnnaagcttggcgtggatccgatatcaactagatcttgagacaaatggcagtattcatccacaattttaaaagaaaaggggggattggggggtacagtgcaggggaaagaatagtagacataatagcaacagacatacaaactaaag

SEQ ID NO: 18834 - DNA, 301 bp, Artificial Sequence
  Pole.3_NTC.30
  crRNA array
  misc_feature (148)..(157): n is a, c, g, or t
cttggctttatatatcttgtggaaaggacgaaacaccgtaatttctactaagtgtagatctgctgcaacgagtcgagaataatttctactaagtgtagatcgatcgtacgggtgtcctaataatttctactaagtgtagatttttttnnnnnnnnnnaagcttggcgtggatccgatatcaactagatcttgagacaaatggcagtattcatccacaattttaaaagaaaaggggggattggggggtacagtgcaggggaaagaatagtagacataatagcaacagacatacaaactaaag

SEQ ID NO: 18835 - DNA, 301 bp, Artificial Sequence
  Pole.3_NTC.31
  crRNA array
  misc_feature (148)..(157): n is a, c, g, or t
cttggctttatatatcttgtggaaaggacgaaacaccgtaatttctactaagtgtagatctgctgcaacgagtcgagaataatttctactaagtgtagatgccgaccgcgtgattgtaggtaatttctactaagtgtagatttttttnnnnnnnnnnaagcttggcgtggatccgatatcaactagatcttgagacaaatggcagtattcatccacaattttaaaagaaaaggggggattggggggtacagtgcaggggaaagaatagtagacataatagcaacagacatacaaactaaag

SEQ ID NO: 18836 - DNA, 301 bp, Artificial Sequence
  Pole.3_NTC.32
  crRNA array
  misc_feature (148)..(157): n is a, c, g, or t
cttggctttatatatcttgtggaaaggacgaaacaccgtaatttctactaagtgtagatctgctgcaacgagtcgagaataatttctactaagtgtagatgcacgttacgcccgggtcactaatttctactaagtgtagatttttttnnnnnnnnnnaagcttggcgtggatccgatatcaactagatcttgagacaaatggcagtattcatccacaattttaaaagaaaaggggggattggggggtacagtgcaggggaaagaatagtagacataatagcaacagacatacaaactaaag

SEQ ID NO: 18837 - DNA, 301 bp, Artificial Sequence
  Pole.3_NTC.33
  crRNA array
  misc_feature (148)..(157): n is a, c, g, or t
cttggctttatatatcttgtggaaaggacgaaacaccgtaatttctactaagtgtagatctgctgcaacgagtcgagaataatttctactaagtgtagattaagcgaccgacgcattcgctaatttctactaagtgtagatttttttnnnnnnnnnnaagcttggcgtggatccgatatcaactagatcttgagacaaatggcagtattcatccacaattttaaaagaaaaggggggattggggggtacagtgcaggggaaagaatagtagacataatagcaacagacatacaaactaaag

SEQ ID NO: 18838 - DNA, 301 bp, Artificial Sequence
  Pole.3_NTC.34
  crRNA array
  misc_feature (148)..(157): n is a, c, g, or t
cttggctttatatatcttgtggaaaggacgaaacaccgtaatttctactaagtgtagatctgctgcaacgagtcgagaataatttctactaagtgtagattagcgttcgacacgtgaaactaatttctactaagtgtagatttttttnnnnnnnnnnaagcttggcgtggatccgatatcaactagatcttgagacaaatggcagtattcatccacaattttaaaagaaaaggggggattggggggtacagtgcaggggaaagaatagtagacataatagcaacagacatacaaactaaag

SEQ ID NO: 18839 - DNA, 301 bp, Artificial Sequence
  Pole.3_NTC.35
  crRNA array
  misc_feature (148)..(157): n is a, c, g, or t
cttggctttatatatcttgtggaaaggacgaaacaccgtaatttctactaagtgtagatctgctgcaacgagtcgagaataatttctactaagtgtagattggcgcgtaatcgctattcgtaatttctactaagtgtagatttttttnnnnnnnnnnaagcttggcgtggatccgatatcaactagatcttgagacaaatggcagtattcatccacaattttaaaagaaaaggggggattggggggtacagtgcaggggaaagaatagtagacataatagcaacagacatacaaactaaag

SEQ ID NO: 18840 - DNA, 301 bp, Artificial Sequence
  Pole.3_NTC.36
  crRNA array
  misc_feature (148)..(157): n is a, c, g, or t
cttggctttatatatcttgtggaaaggacgaaacaccgtaatttctactaagtgtagatctgctgcaacgagtcgagaataatttctactaagtgtagatcaacccgccgtagcgggccttaatttctactaagtgtagatttttttnnnnnnnnnnaagcttggcgtggatccgatatcaactagatcttgagacaaatggcagtattcatccacaattttaaaagaaaaggggggattggggggtacagtgcaggggaaagaatagtagacataatagcaacagacatacaaactaaag

SEQ ID NO: 18841 - DNA, 301 bp, Artificial Sequence
  Pole.3_NTC.37
  crRNA array
  misc_feature (148)..(157): n is a, c, g, or t
cttggctttatatatcttgtggaaaggacgaaacaccgtaatttctactaagtgtagatctgctgcaacgagtcgagaataatttctactaagtgtagattttgcgttgacgcgattacttaatttctactaagtgtagatttttttnnnnnnnnnnaagcttggcgtggatccgatatcaactagatcttgagacaaatggcagtattcatccacaattttaaaagaaaaggggggattggggggtacagtgcaggggaaagaatagtagacataatagcaacagacatacaaactaaag

SEQ ID NO: 18842 - DNA, 301 bp, Artificial Sequence
  Pole.3_NTC.38
  crRNA array
  misc_feature (148)..(157): n is a, c, g, or t
cttggctttatatatcttgtggaaaggacgaaacaccgtaatttctactaagtgtagatctgctgcaacgagtcgagaataatttctactaagtgtagataacggagcgcgatactaccataatttctactaagtgtagatttttttnnnnnnnnnnaagcttggcgtggatccgatatcaactagatcttgagacaaatggcagtattcatccacaattttaaaagaaaaggggggattggggggtacagtgcaggggaaagaatagtagacataatagcaacagacatacaaactaaag

SEQ ID NO: 18843 - DNA, 301 bp, Artificial Sequence
  Pole.3_NTC.39
  crRNA array
  misc_feature (148)..(157): n is a, c, g, or t
cttggctttatatatcttgtggaaaggacgaaacaccgtaatttctactaagtgtagatctgctgcaacgagtcgagaataatttctactaagtgtagatccggacgttataacgtttcttaatttctactaagtgtagatttttttnnnnnnnnnnaagcttggcgtggatccgatatcaactagatcttgagacaaatggcagtattcatccacaattttaaaagaaaaggggggattggggggtacagtgcaggggaaagaatagtagacataatagcaacagacatacaaactaaag

SEQ ID NO: 18844 - DNA, 301 bp, Artificial Sequence
  Pole.3_NTC.4
  crRNA array
  misc_feature (148)..(157): n is a, c, g, or t
cttggctttatatatcttgtggaaaggacgaaacaccgtaatttctactaagtgtagatctgctgcaacgagtcgagaataatttctactaagtgtagatatacccgtcgcgaacgtgagtaatttctactaagtgtagatttttttnnnnnnnnnnaagcttggcgtggatccgatatcaactagatcttgagacaaatggcagtattcatccacaattttaaaagaaaaggggggattggggggtacagtgcaggggaaagaatagtagacataatagcaacagacatacaaactaaag

SEQ ID NO: 18845 - DNA, 301 bp, Artificial Sequence
  Pole.3_NTC.40
  crRNA array
  misc_feature (148)..(157): n is a, c, g, or t
cttggctttatatatcttgtggaaaggacgaaacaccgtaatttctactaagtgtagatctgctgcaacgagtcgagaataatttctactaagtgtagatattcgcgaacccggccggaataatttctactaagtgtagatttttttnnnnnnnnnnaagcttggcgtggatccgatatcaactagatcttgagacaaatggcagtattcatccacaattttaaaagaaaaggggggattggggggtacagtgcaggggaaagaatagtagacataatagcaacagacatacaaactaaag

SEQ ID NO: 18846 - DNA, 301 bp, Artificial Sequence
  Pole.3_NTC.41
  crRNA array
  misc_feature (148)..(157): n is a, c, g, or t
cttggctttatatatcttgtggaaaggacgaaacaccgtaatttctactaagtgtagatctgctgcaacgagtcgagaataatttctactaagtgtagatttgatggcgcgacgcgttattaatttctactaagtgtagatttttttnnnnnnnnnnaagcttggcgtggatccgatatcaactagatcttgagacaaatggcagtattcatccacaattttaaaagaaaaggggggattggggggtacagtgcaggggaaagaatagtagacataatagcaacagacatacaaactaaag

SEQ ID NO: 18847 - DNA, 301 bp, Artificial Sequence
  Pole.3_NTC.42
  crRNA array
  misc_feature (148)..(157): n is a, c, g, or t
cttggctttatatatcttgtggaaaggacgaaacaccgtaatttctactaagtgtagatctgctgcaacgagtcgagaataatttctactaagtgtagatggtcaaatcgcggcgataactaatttctactaagtgtagatttttttnnnnnnnnnnaagcttggcgtggatccgatatcaactagatcttgagacaaatggcagtattcatccacaattttaaaagaaaaggggggattggggggtacagtgcaggggaaagaatagtagacataatagcaacagacatacaaactaaag

SEQ ID NO: 18848 - DNA, 301 bp, Artificial Sequence
  Pole.3_NTC.43
  crRNA array
  misc_feature (148)..(157): n is a, c, g, or t
cttggctttatatatcttgtggaaaggacgaaacaccgtaatttctactaagtgtagatctgctgcaacgagtcgagaataatttctactaagtgtagatcgactcgcgcattgaactggtaatttctactaagtgtagatttttttnnnnnnnnnnaagcttggcgtggatccgatatcaactagatcttgagacaaatggcagtattcatccacaattttaaaagaaaaggggggattggggggtacagtgcaggggaaagaatagtagacataatagcaacagacatacaaactaaag

SEQ ID NO: 18849 - DNA, 301 bp, Artificial Sequence
  Pole.3_NTC.44
  crRNA array
  misc_feature (148)..(157): n is a, c, g, or t
cttggctttatatatcttgtggaaaggacgaaacaccgtaatttctactaagtgtagatctgctgcaacgagtcgagaataatttctactaagtgtagatagcgtcgtacgatttatcgttaatttctactaagtgtagatttttttnnnnnnnnnnaagcttggcgtggatccgatatcaactagatcttgagacaaatggcagtattcatccacaattttaaaagaaaaggggggattggggggtacagtgcaggggaaagaatagtagacataatagcaacagacatacaaactaaag

SEQ ID NO: 18850 - DNA, 301 bp, Artificial Sequence
  Pole.3_NTC.45
  crRNA array
  misc_feature (148)..(157): n is a, c, g, or t
cttggctttatatatcttgtggaaaggacgaaacaccgtaatttctactaagtgtagatctgctgcaacgagtcgagaataatttctactaagtgtagatcggaacgcgtgatactagggtaatttctactaagtgtagatttttttnnnnnnnnnnaagcttggcgtggatccgatatcaactagatcttgagacaaatggcagtattcatccacaattttaaaagaaaaggggggattggggggtacagtgcaggggaaagaatagtagacataatagcaacagacatacaaactaaag

SEQ ID NO: 18851 - DNA, 301 bp, Artificial Sequence
  Pole.3_NTC.46
  crRNA array
  misc_feature (148)..(157): n is a, c, g, or t
cttggctttatatatcttgtggaaaggacgaaacaccgtaatttctactaagtgtagatctgctgcaacgagtcgagaataatttctactaagtgtagatagcgggtcgtagacgcgcggtaatttctactaagtgtagatttttttnnnnnnnnnnaagcttggcgtggatccgatatcaactagatcttgagacaaatggcagtattcatccacaattttaaaagaaaaggggggattggggggtacagtgcaggggaaagaatagtagacataatagcaacagacatacaaactaaag

SEQ ID NO: 18852 - DNA, 301 bp, Artificial Sequence
  Pole.3_NTC.47
  crRNA array
  misc_feature (148)..(157): n is a, c, g, or t
cttggctttatatatcttgtggaaaggacgaaacaccgtaatttctactaagtgtagatctgctgcaacgagtcgagaataatttctactaagtgtagattctcgtatcgcgattgttaataatttctactaagtgtagatttttttnnnnnnnnnnaagcttggcgtggatccgatatcaactagatcttgagacaaatggcagtattcatccacaattttaaaagaaaaggggggattggggggtacagtgcaggggaaagaatagtagacataatagcaacagacatacaaactaaag

SEQ ID NO: 18853 - DNA, 301 bp, Artificial Sequence
  Pole.3_NTC.48
  crRNA array
  misc_feature (148)..(157): n is a, c, g, or t
cttggctttatatatcttgtggaaaggacgaaacaccgtaatttctactaagtgtagatctgctgcaacgagtcgagaataatttctactaagtgtagatcggtcgactacggctgttagtaatttctactaagtgtagatttttttnnnnnnnnnnaagcttggcgtggatccgatatcaactagatcttgagacaaatggcagtattcatccacaattttaaaagaaaaggggggattggggggtacagtgcaggggaaagaatagtagacataatagcaacagacatacaaactaaag

SEQ ID NO: 18854 - DNA, 301 bp, Artificial Sequence
  Pole.3_NTC.49
  crRNA array
  misc_feature (148)..(157): n is a, c, g, or t
cttggctttatatatcttgtggaaaggacgaaacaccgtaatttctactaagtgtagatctgctgcaacgagtcgagaataatttctactaagtgtagattcggggcgcgtcaactgaattaatttctactaagtgtagatttttttnnnnnnnnnnaagcttggcgtggatccgatatcaactagatcttgagacaaatggcagtattcatccacaattttaaaagaaaaggggggattggggggtacagtgcaggggaaagaatagtagacataatagcaacagacatacaaactaaag

SEQ ID NO: 18855 - DNA, 301 bp, Artificial Sequence
  Pole.3_NTC.5
  crRNA array
  misc_feature (148)..(157): n is a, c, g, or t
cttggctttatatatcttgtggaaaggacgaaacaccgtaatttctactaagtgtagatctgctgcaacgagtcgagaataatttctactaagtgtagatgcttacgcgtcgcgaatgtataatttctactaagtgtagatttttttnnnnnnnnnnaagcttggcgtggatccgatatcaactagatcttgagacaaatggcagtattcatccacaattttaaaagaaaaggggggattggggggtacagtgcaggggaaagaatagtagacataatagcaacagacatacaaactaaag

SEQ ID NO: 18856 - DNA, 301 bp, Artificial Sequence
  Pole.3_NTC.50
  crRNA array
  misc_feature (148)..(157): n is a, c, g, or t
cttggctttatatatcttgtggaaaggacgaaacaccgtaatttctactaagtgtagatctgctgcaacgagtcgagaataatttctactaagtgtagatattgccgctcgcgcaaaatctaatttctactaagtgtagatttttttnnnnnnnnnnaagcttggcgtggatccgatatcaactagatcttgagacaaatggcagtattcatccacaattttaaaagaaaaggggggattggggggtacagtgcaggggaaagaatagtagacataatagcaacagacatacaaactaaag

SEQ ID NO: 18857 - DNA, 301 bp, Artificial Sequence
  Pole.3_NTC.51
  crRNA array
  misc_feature (148)..(157): n is a, c, g, or t
cttggctttatatatcttgtggaaaggacgaaacaccgtaatttctactaagtgtagatctgctgcaacgagtcgagaataatttctactaagtgtagattaacgcgcaacacgccaatgtaatttctactaagtgtagatttttttnnnnnnnnnnaagcttggcgtggatccgatatcaactagatcttgagacaaatggcagtattcatccacaattttaaaagaaaaggggggattggggggtacagtgcaggggaaagaatagtagacataatagcaacagacatacaaactaaag

SEQ ID NO: 18858 - DNA, 301 bp, Artificial Sequence
  Pole.3_NTC.6
  crRNA array
  misc_feature (148)..(157): n is a, c, g, or t
cttggctttatatatcttgtggaaaggacgaaacaccgtaatttctactaagtgtagatctgctgcaacgagtcgagaataatttctactaagtgtagatcgaatcgcgcctacgggaattaatttctactaagtgtagatttttttnnnnnnnnnnaagcttggcgtggatccgatatcaactagatcttgagacaaatggcagtattcatccacaattttaaaagaaaaggggggattggggggtacagtgcaggggaaagaatagtagacataatagcaacagacatacaaactaaag

SEQ ID NO: 18859 - DNA, 301 bp, Artificial Sequence
  Pole.3_NTC.7
  crRNA array
  misc_feature (148)..(157): n is a, c, g, or t
cttggctttatatatcttgtggaaaggacgaaacaccgtaatttctactaagtgtagatctgctgcaacgagtcgagaataatttctactaagtgtagatcgccgaacggataagactattaatttctactaagtgtagatttttttnnnnnnnnnnaagcttggcgtggatccgatatcaactagatcttgagacaaatggcagtattcatccacaattttaaaagaaaaggggggattggggggtacagtgcaggggaaagaatagtagacataatagcaacagacatacaaactaaag

SEQ ID NO: 18860 - DNA, 301 bp, Artificial Sequence
  Pole.3_NTC.8
  crRNA array
  misc_feature (148)..(157): n is a, c, g, or t
cttggctttatatatcttgtggaaaggacgaaacaccgtaatttctactaagtgtagatctgctgcaacgagtcgagaataatttctactaagtgtagatcgaccgaggttacgctgggataatttctactaagtgtagatttttttnnnnnnnnnnaagcttggcgtggatccgatatcaactagatcttgagacaaatggcagtattcatccacaattttaaaagaaaaggggggattggggggtacagtgcaggggaaagaatagtagacataatagcaacagacatacaaactaaag

SEQ ID NO: 18861 - DNA, 301 bp, Artificial Sequence
  Pole.3_NTC.9
  crRNA array
  misc_feature (148)..(157): n is a, c, g, or t
cttggctttatatatcttgtggaaaggacgaaacaccgtaatttctactaagtgtagatctgctgcaacgagtcgagaataatttctactaagtgtagatatcgccgtacggctatggcataatttctactaagtgtagatttttttnnnnnnnnnnaagcttggcgtggatccgatatcaactagatcttgagacaaatggcagtattcatccacaattttaaaagaaaaggggggattggggggtacagtgcaggggaaagaatagtagacataatagcaacagacatacaaactaaag

SEQ ID NO: 18862 - DNA, 301 bp, Artificial Sequence
  Pole.4_NTC.0
  crRNA array
  misc_feature (148)..(157): n is a, c, g, or t
cttggctttatatatcttgtggaaaggacgaaacaccgtaatttctactaagtgtagatgggagatgatatagcggcagtaatttctactaagtgtagattatagcgtcgcgcgctaatttaatttctactaagtgtagatttttttnnnnnnnnnnaagcttggcgtggatccgatatcaactagatcttgagacaaatggcagtattcatccacaattttaaaagaaaaggggggattggggggtacagtgcaggggaaagaatagtagacataatagcaacagacatacaaactaaag

SEQ ID NO: 18863 - DNA, 301 bp, Artificial Sequence
  Pole.4_NTC.1
  crRNA array
  misc_feature (148)..(157): n is a, c, g, or t
cttggctttatatatcttgtggaaaggacgaaacaccgtaatttctactaagtgtagatgggagatgatatagcggcagtaatttctactaagtgtagatcgcgtaaccgttccggctcctaatttctactaagtgtagatttttttnnnnnnnnnnaagcttggcgtggatccgatatcaactagatcttgagacaaatggcagtattcatccacaattttaaaagaaaaggggggattggggggtacagtgcaggggaaagaatagtagacataatagcaacagacatacaaactaaag

SEQ ID NO: 18864 - DNA, 301 bp, Artificial Sequence
  Pole.4_NTC.10
  crRNA array
  misc_feature (148)..(157): n is a, c, g, or t
cttggctttatatatcttgtggaaaggacgaaacaccgtaatttctactaagtgtagatgggagatgatatagcggcagtaatttctactaagtgtagatcgctaagttcgcgcgggccgtaatttctactaagtgtagatttttttnnnnnnnnnnaagcttggcgtggatccgatatcaactagatcttgagacaaatggcagtattcatccacaattttaaaagaaaaggggggattggggggtacagtgcaggggaaagaatagtagacataatagcaacagacatacaaactaaag

SEQ ID NO: 18865 - DNA, 301 bp, Artificial Sequence
  Pole.4_NTC.11
  crRNA array
  misc_feature (148)..(157): n is a, c, g, or t
cttggctttatatatcttgtggaaaggacgaaacaccgtaatttctactaagtgtagatgggagatgatatagcggcagtaatttctactaagtgtagatcgttcgtcgacgaagcaatctaatttctactaagtgtagatttttttnnnnnnnnnnaagcttggcgtggatccgatatcaactagatcttgagacaaatggcagtattcatccacaattttaaaagaaaaggggggattggggggtacagtgcaggggaaagaatagtagacataatagcaacagacatacaaactaaag

SEQ ID NO: 18866 - DNA, 301 bp, Artificial Sequence
  Pole.4_NTC.12
  crRNA array
  misc_feature (148)..(157): n is a, c, g, or t
cttggctttatatatcttgtggaaaggacgaaacaccgtaatttctactaagtgtagatgggagatgatatagcggcagtaatttctactaagtgtagatcgccgacgattaatcaatagtaatttctactaagtgtagatttttttnnnnnnnnnnaagcttggcgtggatccgatatcaactagatcttgagacaaatggcagtattcatccacaattttaaaagaaaaggggggattggggggtacagtgcaggggaaagaatagtagacataatagcaacagacatacaaactaaag

SEQ ID NO: 18867 - DNA, 301 bp, Artificial Sequence
  Pole.4_NTC.13
  crRNA array
  misc_feature (148)..(157): n is a, c, g, or t
cttggctttatatatcttgtggaaaggacgaaacaccgtaatttctactaagtgtagatgggagatgatatagcggcagtaatttctactaagtgtagatgaccgttgtatcgcgatcaataatttctactaagtgtagatttttttnnnnnnnnnnaagcttggcgtggatccgatatcaactagatcttgagacaaatggcagtattcatccacaattttaaaagaaaaggggggattggggggtacagtgcaggggaaagaatagtagacataatagcaacagacatacaaactaaag

SEQ ID NO: 18868 - DNA, 301 bp, Artificial Sequence
  Pole.4_NTC.14
  crRNA array
  misc_feature (148)..(157): n is a, c, g, or t
cttggctttatatatcttgtggaaaggacgaaacaccgtaatttctactaagtgtagatgggagatgatatagcggcagtaatttctactaagtgtagatccgttcgtgcgatagtgttttaatttctactaagtgtagatttttttnnnnnnnnnnaagcttggcgtggatccgatatcaactagatcttgagacaaatggcagtattcatccacaattttaaaagaaaaggggggattggggggtacagtgcaggggaaagaatagtagacataatagcaacagacatacaaactaaag

SEQ ID NO: 18869 - DNA, 301 bp, Artificial Sequence
  Pole.4_NTC.15
  crRNA array
  misc_feature (148)..(157): n is a, c, g, or t
cttggctttatatatcttgtggaaaggacgaaacaccgtaatttctactaagtgtagatgggagatgatatagcggcagtaatttctactaagtgtagatgttgtcgtgccgcgaatttataatttctactaagtgtagatttttttnnnnnnnnnnaagcttggcgtggatccgatatcaactagatcttgagacaaatggcagtattcatccacaattttaaaagaaaaggggggattggggggtacagtgcaggggaaagaatagtagacataatagcaacagacatacaaactaaag

SEQ ID NO: 18870 - DNA, 301 bp, Artificial Sequence
  Pole.4_NTC.16
  crRNA array
  misc_feature (148)..(157): n is a, c, g, or t
cttggctttatatatcttgtggaaaggacgaaacaccgtaatttctactaagtgtagatgggagatgatatagcggcagtaatttctactaagtgtagatcggtacgttagacgaaaatttaatttctactaagtgtagatttttttnnnnnnnnnnaagcttggcgtggatccgatatcaactagatcttgagacaaatggcagtattcatccacaattttaaaagaaaaggggggattggggggtacagtgcaggggaaagaatagtagacataatagcaacagacatacaaactaaag

SEQ ID NO: 18871 - DNA, 301 bp, Artificial Sequence
  Pole.4_NTC.17
  crRNA array
  misc_feature (148)..(157): n is a, c, g, or t
cttggctttatatatcttgtggaaaggacgaaacaccgtaatttctactaagtgtagatgggagatgatatagcggcagtaatttctactaagtgtagattatcgaacgctatcgaacgttaatttctactaagtgtagatttttttnnnnnnnnnnaagcttggcgtggatccgatatcaactagatcttgagacaaatggcagtattcatccacaattttaaaagaaaaggggggattggggggtacagtgcaggggaaagaatagtagacataatagcaacagacatacaaactaaag

SEQ ID NO: 18872 - DNA, 301 bp, Artificial Sequence
  Pole.4_NTC.18
  crRNA array
  misc_feature (148)..(157): n is a, c, g, or t
cttggctttatatatcttgtggaaaggacgaaacaccgtaatttctactaagtgtagatgggagatgatatagcggcagtaatttctactaagtgtagattccggttacgaccggcaaaataatttctactaagtgtagatttttttnnnnnnnnnnaagcttggcgtggatccgatatcaactagatcttgagacaaatggcagtattcatccacaattttaaaagaaaaggggggattggggggtacagtgcaggggaaagaatagtagacataatagcaacagacatacaaactaaag

SEQ ID NO: 18873 - DNA, 301 bp, Artificial Sequence
  Pole.4_NTC.19
  crRNA array
  misc_feature (148)..(157): n is a, c, g, or t
cttggctttatatatcttgtggaaaggacgaaacaccgtaatttctactaagtgtagatgggagatgatatagcggcagtaatttctactaagtgtagatcgtcgtagaacgatacccgataatttctactaagtgtagatttttttnnnnnnnnnnaagcttggcgtggatccgatatcaactagatcttgagacaaatggcagtattcatccacaattttaaaagaaaaggggggattggggggtacagtgcaggggaaagaatagtagacataatagcaacagacatacaaactaaag

SEQ ID NO: 18874 - DNA, 301 bp, Artificial Sequence
  Pole.4_NTC.2
  crRNA array
  misc_feature (148)..(157): n is a, c, g, or t
cttggctttatatatcttgtggaaaggacgaaacaccgtaatttctactaagtgtagatgggagatgatatagcggcagtaatttctactaagtgtagatttatgtcgcgccgcgacccgtaatttctactaagtgtagatttttttnnnnnnnnnnaagcttggcgtggatccgatatcaactagatcttgagacaaatggcagtattcatccacaattttaaaagaaaaggggggattggggggtacagtgcaggggaaagaatagtagacataatagcaacagacatacaaactaaag

SEQ ID NO: 18875 - DNA, 301 bp, Artificial Sequence
  Pole.4_NTC.20
  crRNA array
  misc_feature (148)..(157): n is a, c, g, or t
cttggctttatatatcttgtggaaaggacgaaacaccgtaatttctactaagtgtagatgggagatgatatagcggcagtaatttctactaagtgtagatattccggcgcgaccagaagataatttctactaagtgtagatttttttnnnnnnnnnnaagcttggcgtggatccgatatcaactagatcttgagacaaatggcagtattcatccacaattttaaaagaaaaggggggattggggggtacagtgcaggggaaagaatagtagacataatagcaacagacatacaaactaaag

SEQ ID NO: 18876 - DNA, 301 bp, Artificial Sequence
  Pole.4_NTC.21
  crRNA array
  misc_feature (148)..(157): n is a, c, g, or t
cttggctttatatatcttgtggaaaggacgaaacaccgtaatttctactaagtgtagatgggagatgatatagcggcagtaatttctactaagtgtagatgtataacttcgcgcggtccgtaatttctactaagtgtagatttttttnnnnnnnnnnaagcttggcgtggatccgatatcaactagatcttgagacaaatggcagtattcatccacaattttaaaagaaaaggggggattggggggtacagtgcaggggaaagaatagtagacataatagcaacagacatacaaactaaag

SEQ ID NO: 18877 - DNA, 301 bp, Artificial Sequence
  Pole.4_NTC.22
  crRNA array
  misc_feature (148)..(157): n is a, c, g, or t
cttggctttatatatcttgtggaaaggacgaaacaccgtaatttctactaagtgtagatgggagatgatatagcggcagtaatttctactaagtgtagatgcgcgtcaacgtaatgtgcctaatttctactaagtgtagatttttttnnnnnnnnnnaagcttggcgtggatccgatatcaactagatcttgagacaaatggcagtattcatccacaattttaaaagaaaaggggggattggggggtacagtgcaggggaaagaatagtagacataatagcaacagacatacaaactaaag

SEQ ID NO: 18878 - DNA, 301 bp, Artificial Sequence
  Pole.4_NTC.23
  crRNA array
  misc_feature (148)..(157): n is a, c, g, or t
cttggctttatatatcttgtggaaaggacgaaacaccgtaatttctactaagtgtagatgggagatgatatagcggcagtaatttctactaagtgtagatacgcgctattatcgtaggtgtaatttctactaagtgtagatttttttnnnnnnnnnnaagcttggcgtggatccgatatcaactagatcttgagacaaatggcagtattcatccacaattttaaaagaaaaggggggattggggggtacagtgcaggggaaagaatagtagacataatagcaacagacatacaaactaaag

SEQ ID NO: 18879 - DNA, 301 bp, Artificial Sequence
  Pole.4_NTC.24
  crRNA array
  misc_feature (148)..(157): n is a, c, g, or t
cttggctttatatatcttgtggaaaggacgaaacaccgtaatttctactaagtgtagatgggagatgatatagcggcagtaatttctactaagtgtagatactatcgacgttcgtcccggtaatttctactaagtgtagatttttttnnnnnnnnnnaagcttggcgtggatccgatatcaactagatcttgagacaaatggcagtattcatccacaattttaaaagaaaaggggggattggggggtacagtgcaggggaaagaatagtagacataatagcaacagacatacaaactaaag

SEQ ID NO: 18880 - DNA, 301 bp, Artificial Sequence
  Pole.4_NTC.25
  crRNA array
  misc_feature (148)..(157): n is a, c, g, or t
cttggctttatatatcttgtggaaaggacgaaacaccgtaatttctactaagtgtagatgggagatgatatagcggcagtaatttctactaagtgtagattcgcgttatcgtgccgtgcgtaatttctactaagtgtagatttttttnnnnnnnnnnaagcttggcgtggatccgatatcaactagatcttgagacaaatggcagtattcatccacaattttaaaagaaaaggggggattggggggtacagtgcaggggaaagaatagtagacataatagcaacagacatacaaactaaag

SEQ ID NO: 18881 - DNA, 301 bp, Artificial Sequence
  Pole.4_NTC.26
  crRNA array
  misc_feature (148)..(157): n is a, c, g, or t
cttggctttatatatcttgtggaaaggacgaaacaccgtaatttctactaagtgtagatgggagatgatatagcggcagtaatttctactaagtgtagatcgcgacggcggttttaacactaatttctactaagtgtagatttttttnnnnnnnnnnaagcttggcgtggatccgatatcaactagatcttgagacaaatggcagtattcatccacaattttaaaagaaaaggggggattggggggtacagtgcaggggaaagaatagtagacataatagcaacagacatacaaactaaag

SEQ ID NO: 18882 - DNA, 301 bp, Artificial Sequence
  Pole.4_NTC.27
  crRNA array
  misc_feature (148)..(157): n is a, c, g, or t
cttggctttatatatcttgtggaaaggacgaaacaccgtaatttctactaagtgtagatgggagatgatatagcggcagtaatttctactaagtgtagatgtcgcgttgcgaccggcgcttaatttctactaagtgtagatttttttnnnnnnnnnnaagcttggcgtggatccgatatcaactagatcttgagacaaatggcagtattcatccacaattttaaaagaaaaggggggattggggggtacagtgcaggggaaagaatagtagacataatagcaacagacatacaaactaaag

SEQ ID NO: 18883 - DNA, 301 bp, Artificial Sequence
  Pole.4_NTC.28
  crRNA array
  misc_feature (148)..(157): n is a, c, g, or t
cttggctttatatatcttgtggaaaggacgaaacaccgtaatttctactaagtgtagatgggagatgatatagcggcagtaatttctactaagtgtagataccgctaatcggcgtaaacttaatttctactaagtgtagatttttttnnnnnnnnnnaagcttggcgtggatccgatatcaactagatcttgagacaaatggcagtattcatccacaattttaaaagaaaaggggggattggggggtacagtgcaggggaaagaatagtagacataatagcaacagacatacaaactaaag

SEQ ID NO: 18884 - DNA, 301 bp, Artificial Sequence
  Pole.4_NTC.29
  crRNA array
  misc_feature (148)..(157): n is a, c, g, or t
cttggctttatatatcttgtggaaaggacgaaacaccgtaatttctactaagtgtagatgggagatgatatagcggcagtaatttctactaagtgtagatcgcgatctataccgtctatataatttctactaagtgtagatttttttnnnnnnnnnnaagcttggcgtggatccgatatcaactagatcttgagacaaatggcagtattcatccacaattttaaaagaaaaggggggattggggggtacagtgcaggggaaagaatagtagacataatagcaacagacatacaaactaaag

SEQ ID NO: 18885 - DNA, 301 bp, Artificial Sequence
  Pole.4_NTC.3
  crRNA array
  misc_feature (148)..(157): n is a, c, g, or t
cttggctttatatatcttgtggaaaggacgaaacaccgtaatttctactaagtgtagatgggagatgatatagcggcagtaatttctactaagtgtagattcgacgcgagacgacgtacataatttctactaagtgtagatttttttnnnnnnnnnnaagcttggcgtggatccgatatcaactagatcttgagacaaatggcagtattcatccacaattttaaaagaaaaggggggattggggggtacagtgcaggggaaagaatagtagacataatagcaacagacatacaaactaaag

SEQ ID NO: 18886 - DNA, 301 bp, Artificial Sequence
  Pole.4_NTC.30
  crRNA array
  misc_feature (148)..(157): n is a, c, g, or t
cttggctttatatatcttgtggaaaggacgaaacaccgtaatttctactaagtgtagatgggagatgatatagcggcagtaatttctactaagtgtagatcgatcgtacgggtgtcctaataatttctactaagtgtagatttttttnnnnnnnnnnaagcttggcgtggatccgatatcaactagatcttgagacaaatggcagtattcatccacaattttaaaagaaaaggggggattggggggtacagtgcaggggaaagaatagtagacataatagcaacagacatacaaactaaag

SEQ ID NO: 18887 - DNA, 301 bp, Artificial Sequence
  Pole.4_NTC.31
  crRNA array
  misc_feature (148)..(157): n is a, c, g, or t
cttggctttatatatcttgtggaaaggacgaaacaccgtaatttctactaagtgtagatgggagatgatatagcggcagtaatttctactaagtgtagatgccgaccgcgtgattgtaggtaatttctactaagtgtagatttttttnnnnnnnnnnaagcttggcgtggatccgatatcaactagatcttgagacaaatggcagtattcatccacaattttaaaagaaaaggggggattggggggtacagtgcaggggaaagaatagtagacataatagcaacagacatacaaactaaag

SEQ ID NO: 18888 - DNA, 301 bp, Artificial Sequence
  Pole.4_NTC.32
  crRNA array
  misc_feature (148)..(157): n is a, c, g, or t
cttggctttatatatcttgtggaaaggacgaaacaccgtaatttctactaagtgtagatgggagatgatatagcggcagtaatttctactaagtgtagatgcacgttacgcccgggtcactaatttctactaagtgtagatttttttnnnnnnnnnnaagcttggcgtggatccgatatcaactagatcttgagacaaatggcagtattcatccacaattttaaaagaaaaggggggattggggggtacagtgcaggggaaagaatagtagacataatagcaacagacatacaaactaaag

SEQ ID NO: 18889 - DNA, 301 bp, Artificial Sequence
  Pole.4_NTC.33
  crRNA array
  misc_feature (148)..(157): n is a, c, g, or t
cttggctttatatatcttgtggaaaggacgaaacaccgtaatttctactaagtgtagatgggagatgatatagcggcagtaatttctactaagtgtagattaagcgaccgacgcattcgctaatttctactaagtgtagatttttttnnnnnnnnnnaagcttggcgtggatccgatatcaactagatcttgagacaaatggcagtattcatccacaattttaaaagaaaaggggggattggggggtacagtgcaggggaaagaatagtagacataatagcaacagacatacaaactaaag

SEQ ID NO: 18890 - DNA, 301 bp, Artificial Sequence
  Pole.4_NTC.34
  crRNA array
  misc_feature (148)..(157): n is a, c, g, or t
cttggctttatatatcttgtggaaaggacgaaacaccgtaatttctactaagtgtagatgggagatgatatagcggcagtaatttctactaagtgtagattagcgttcgacacgtgaaactaatttctactaagtgtagatttttttnnnnnnnnnnaagcttggcgtggatccgatatcaactagatcttgagacaaatggcagtattcatccacaattttaaaagaaaaggggggattggggggtacagtgcaggggaaagaatagtagacataatagcaacagacatacaaactaaag

SEQ ID NO: 18891 - DNA, 301 bp, Artificial Sequence
  Pole.4_NTC.35
  crRNA array
  misc_feature (148)..(157): n is a, c, g, or t
cttggctttatatatcttgtggaaaggacgaaacaccgtaatttctactaagtgtagatgggagatgatatagcggcagtaatttctactaagtgtagattggcgcgtaatcgctattcgtaatttctactaagtgtagatttttttnnnnnnnnnnaagcttggcgtggatccgatatcaactagatcttgagacaaatggcagtattcatccacaattttaaaagaaaaggggggattggggggtacagtgcaggggaaagaatagtagacataatagcaacagacatacaaactaaag

SEQ ID NO: 18892 - DNA, 301 bp, Artificial Sequence
  Pole.4_NTC.36
  crRNA array
  misc_feature (148)..(157): n is a, c, g, or t
cttggctttatatatcttgtggaaaggacgaaacaccgtaatttctactaagtgtagatgggagatgatatagcggcagtaatttctactaagtgtagatcaacccgccgtagcgggccttaatttctactaagtgtagatttttttnnnnnnnnnnaagcttggcgtggatccgatatcaactagatcttgagacaaatggcagtattcatccacaattttaaaagaaaaggggggattggggggtacagtgcaggggaaagaatagtagacataatagcaacagacatacaaactaaag

SEQ ID NO: 18893 - DNA, 301 bp, Artificial Sequence
  Pole.4_NTC.37
  crRNA array
  misc_feature (148)..(157): n is a, c, g, or t
cttggctttatatatcttgtggaaaggacgaaacaccgtaatttctactaagtgtagatgggagatgatatagcggcagtaatttctactaagtgtagattttgcgttgacgcgattacttaatttctactaagtgtagatttttttnnnnnnnnnnaagcttggcgtggatccgatatcaactagatcttgagacaaatggcagtattcatccacaattttaaaagaaaaggggggattggggggtacagtgcaggggaaagaatagtagacataatagcaacagacatacaaactaaag

SEQ ID NO: 18894 - DNA, 301 bp, Artificial Sequence
  Pole.4_NTC.38
  crRNA array
  misc_feature (148)..(157): n is a, c, g, or t
cttggctttatatatcttgtggaaaggacgaaacaccgtaatttctactaagtgtagatgggagatgatatagcggcagtaatttctactaagtgtagataacggagcgcgatactaccataatttctactaagtgtagatttttttnnnnnnnnnnaagcttggcgtggatccgatatcaactagatcttgagacaaatggcagtattcatccacaattttaaaagaaaaggggggattggggggtacagtgcaggggaaagaatagtagacataatagcaacagacatacaaactaaag

SEQ ID NO: 18895 - DNA, 301 bp, Artificial Sequence
  Pole.4_NTC.39
  crRNA array
  misc_feature (148)..(157): n is a, c, g, or t
cttggctttatatatcttgtggaaaggacgaaacaccgtaatttctactaagtgtagatgggagatgatatagcggcagtaatttctactaagtgtagatccggacgttataacgtttcttaatttctactaagtgtagatttttttnnnnnnnnnnaagcttggcgtggatccgatatcaactagatcttgagacaaatggcagtattcatccacaattttaaaagaaaaggggggattggggggtacagtgcaggggaaagaatagtagacataatagcaacagacatacaaactaaag

SEQ ID NO: 18896 - DNA, 301 bp, Artificial Sequence
  Pole.4_NTC.4
  crRNA array
  misc_feature (148)..(157): n is a, c, g, or t
cttggctttatatatcttgtggaaaggacgaaacaccgtaatttctactaagtgtagatgggagatgatatagcggcagtaatttctactaagtgtagatatacccgtcgcgaacgtgagtaatttctactaagtgtagatttttttnnnnnnnnnnaagcttggcgtggatccgatatcaactagatcttgagacaaatggcagtattcatccacaattttaaaagaaaaggggggattggggggtacagtgcaggggaaagaatagtagacataatagcaacagacatacaaactaaag

SEQ ID NO: 18897 - DNA, 301 bp, Artificial Sequence
  Pole.4_NTC.40
  crRNA array
  misc_feature (148)..(157): n is a, c, g, or t
cttggctttatatatcttgtggaaaggacgaaacaccgtaatttctactaagtgtagatgggagatgatatagcggcagtaatttctactaagtgtagatattcgcgaacccggccggaataatttctactaagtgtagatttttttnnnnnnnnnnaagcttggcgtggatccgatatcaactagatcttgagacaaatggcagtattcatccacaattttaaaagaaaaggggggattggggggtacagtgcaggggaaagaatagtagacataatagcaacagacatacaaactaaag

SEQ ID NO: 18898 - DNA, 301 bp, Artificial Sequence
  Pole.4_NTC.41
  crRNA array
  misc_feature (148)..(157): n is a, c, g, or t
cttggctttatatatcttgtggaaaggacgaaacaccgtaatttctactaagtgtagatgggagatgatatagcggcagtaatttctactaagtgtagatttgatggcgcgacgcgttattaatttctactaagtgtagatttttttnnnnnnnnnnaagcttggcgtggatccgatatcaactagatcttgagacaaatggcagtattcatccacaattttaaaagaaaaggggggattggggggtacagtgcaggggaaagaatagtagacataatagcaacagacatacaaactaaag

SEQ ID NO: 18899 - DNA, 301 bp, Artificial Sequence
  Pole.4_NTC.42
  crRNA array
  misc_feature (148)..(157): n is a, c, g, or t
cttggctttatatatcttgtggaaaggacgaaacaccgtaatttctactaagtgtagatgggagatgatatagcggcagtaatttctactaagtgtagatggtcaaatcgcggcgataactaatttctactaagtgtagatttttttnnnnnnnnnnaagcttggcgtggatccgatatcaactagatcttgagacaaatggcagtattcatccacaattttaaaagaaaaggggggattggggggtacagtgcaggggaaagaatagtagacataatagcaacagacatacaaactaaag

SEQ ID NO: 18900 - DNA, 301 bp, Artificial Sequence
  Pole.4_NTC.43
  crRNA array
  misc_feature (148)..(157): n is a, c, g, or t
cttggctttatatatcttgtggaaaggacgaaacaccgtaatttctactaagtgtagatgggagatgatatagcggcagtaatttctactaagtgtagatcgactcgcgcattgaactggtaatttctactaagtgtagatttttttnnnnnnnnnnaagcttggcgtggatccgatatcaactagatcttgagacaaatggcagtattcatccacaattttaaaagaaaaggggggattggggggtacagtgcaggggaaagaatagtagacataatagcaacagacatacaaactaaag

SEQ ID NO: 18901 - DNA, 301 bp, Artificial Sequence
  Pole.4_NTC.44
  crRNA array
  misc_feature (148)..(157): n is a, c, g, or t
cttggctttatatatcttgtggaaaggacgaaacaccgtaatttctactaagtgtagatgggagatgatatagcggcagtaatttctactaagtgtagatagcgtcgtacgatttatcgttaatttctactaagtgtagatttttttnnnnnnnnnnaagcttggcgtggatccgatatcaactagatcttgagacaaatggcagtattcatccacaattttaaaagaaaaggggggattggggggtacagtgcaggggaaagaatagtagacataatagcaacagacatacaaactaaag

SEQ ID NO: 18902 - DNA, 301 bp, Artificial Sequence
  Pole.4_NTC.45
  crRNA array
  misc_feature (148)..(157): n is a, c, g, or t
cttggctttatatatcttgtggaaaggacgaaacaccgtaatttctactaagtgtagatgggagatgatatagcggcagtaatttctactaagtgtagatcggaacgcgtgatactagggtaatttctactaagtgtagatttttttnnnnnnnnnnaagcttggcgtggatccgatatcaactagatcttgagacaaatggcagtattcatccacaattttaaaagaaaaggggggattggggggtacagtgcaggggaaagaatagtagacataatagcaacagacatacaaactaaag

SEQ ID NO: 18903 - DNA, 301 bp, Artificial Sequence
  Pole.4_NTC.46
  crRNA array
  misc_feature (148)..(157): n is a, c, g, or t
cttggctttatatatcttgtggaaaggacgaaacaccgtaatttctactaagtgtagatgggagatgatatagcggcagtaatttctactaagtgtagatagcgggtcgtagacgcgcggtaatttctactaagtgtagatttttttnnnnnnnnnnaagcttggcgtggatccgatatcaactagatcttgagacaaatggcagtattcatccacaattttaaaagaaaaggggggattggggggtacagtgcaggggaaagaatagtagacataatagcaacagacatacaaactaaag

SEQ ID NO: 18904 - DNA, 301 bp, Artificial Sequence
  Pole.4_NTC.47
  crRNA array
  misc_feature (148)..(157): n is a, c, g, or t
cttggctttatatatcttgtggaaaggacgaaacaccgtaatttctactaagtgtagatgggagatgatatagcggcagtaatttctactaagtgtagattctcgtatcgcgattgttaataatttctactaagtgtagatttttttnnnnnnnnnnaagcttggcgtggatccgatatcaactagatcttgagacaaatggcagtattcatccacaattttaaaagaaaaggggggattggggggtacagtgcaggggaaagaatagtagacataatagcaacagacatacaaactaaag

SEQ ID NO: 18905 - DNA, 301 bp, Artificial Sequence
  Pole.4_NTC.48
  crRNA array
  misc_feature (148)..(157): n is a, c, g, or t
cttggctttatatatcttgtggaaaggacgaaacaccgtaatttctactaagtgtagatgggagatgatatagcggcagtaatttctactaagtgtagatcggtcgactacggctgttagtaatttctactaagtgtagatttttttnnnnnnnnnnaagcttggcgtggatccgatatcaactagatcttgagacaaatggcagtattcatccacaattttaaaagaaaaggggggattggggggtacagtgcaggggaaagaatagtagacataatagcaacagacatacaaactaaag

SEQ ID NO: 18906 - DNA, 301 bp, Artificial Sequence
  Pole.4_NTC.49
  crRNA array
  misc_feature (148)..(157): n is a, c, g, or t
cttggctttatatatcttgtggaaaggacgaaacaccgtaatttctactaagtgtagatgggagatgatatagcggcagtaatttctactaagtgtagattcggggcgcgtcaactgaattaatttctactaagtgtagatttttttnnnnnnnnnnaagcttggcgtggatccgatatcaactagatcttgagacaaatggcagtattcatccacaattttaaaagaaaaggggggattggggggtacagtgcaggggaaagaatagtagacataatagcaacagacatacaaactaaag

SEQ ID NO: 18907 - DNA, 301 bp, Artificial Sequence
  Pole.4_NTC.5
  crRNA array
  misc_feature (148)..(157): n is a, c, g, or t
cttggctttatatatcttgtggaaaggacgaaacaccgtaatttctactaagtgtagatgggagatgatatagcggcagtaatttctactaagtgtagatgcttacgcgtcgcgaatgtataatttctactaagtgtagatttttttnnnnnnnnnnaagcttggcgtggatccgatatcaactagatcttgagacaaatggcagtattcatccacaattttaaaagaaaaggggggattggggggtacagtgcaggggaaagaatagtagacataatagcaacagacatacaaactaaag

SEQ ID NO: 18908 - DNA, 301 bp, Artificial Sequence
  Pole.4_NTC.50
  crRNA array
  misc_feature (148)..(157): n is a, c, g, or t
cttggctttatatatcttgtggaaaggacgaaacaccgtaatttctactaagtgtagatgggagatgatatagcggcagtaatttctactaagtgtagatattgccgctcgcgcaaaatctaatttctactaagtgtagatttttttnnnnnnnnnnaagcttggcgtggatccgatatcaactagatcttgagacaaatggcagtattcatccacaattttaaaagaaaaggggggattggggggtacagtgcaggggaaagaatagtagacataatagcaacagacatacaaactaaag

SEQ ID NO: 18909 - DNA, 301 bp, Artificial Sequence
  Pole.4_NTC.51
  crRNA array
  misc_feature (148)..(157): n is a, c, g, or t
cttggctttatatatcttgtggaaaggacgaaacaccgtaatttctactaagtgtagatgggagatgatatagcggcagtaatttctactaagtgtagattaacgcgcaacacgccaatgtaatttctactaagtgtagatttttttnnnnnnnnnnaagcttggcgtggatccgatatcaactagatcttgagacaaatggcagtattcatccacaattttaaaagaaaaggggggattggggggtacagtgcaggggaaagaatagtagacataatagcaacagacatacaaactaaag

SEQ ID NO: 18910 - DNA, 301 bp, Artificial Sequence
  Pole.4_NTC.6
  crRNA array
  misc_feature (148)..(157): n is a, c, g, or t
cttggctttatatatcttgtggaaaggacgaaacaccgtaatttctactaagtgtagatgggagatgatatagcggcagtaatttctactaagtgtagatcgaatcgcgcctacgggaattaatttctactaagtgtagatttttttnnnnnnnnnnaagcttggcgtggatccgatatcaactagatcttgagacaaatggcagtattcatccacaattttaaaagaaaaggggggattggggggtacagtgcaggggaaagaatagtagacataatagcaacagacatacaaactaaag

SEQ ID NO: 18911 - DNA, 301 bp, Artificial Sequence
  Pole.4_NTC.7
  crRNA array
  misc_feature (148)..(157): n is a, c, g, or t
cttggctttatatatcttgtggaaaggacgaaacaccgtaatttctactaagtgtagatgggagatgatatagcggcagtaatttctactaagtgtagatcgccgaacggataagactattaatttctactaagtgtagatttttttnnnnnnnnnnaagcttggcgtggatccgatatcaactagatcttgagacaaatggcagtattcatccacaattttaaaagaaaaggggggattggggggtacagtgcaggggaaagaatagtagacataatagcaacagacatacaaactaaag

SEQ ID NO: 18912 - DNA, 301 bp, Artificial Sequence
  Pole.4_NTC.8
  crRNA array
  misc_feature (148)..(157): n is a, c, g, or t
cttggctttatatatcttgtggaaaggacgaaacaccgtaatttctactaagtgtagatgggagatgatatagcggcagtaatttctactaagtgtagatcgaccgaggttacgctgggataatttctactaagtgtagatttttttnnnnnnnnnnaagcttggcgtggatccgatatcaactagatcttgagacaaatggcagtattcatccacaattttaaaagaaaaggggggattggggggtacagtgcaggggaaagaatagtagacataatagcaacagacatacaaactaaag

SEQ ID NO: 18913 - DNA, 301 bp, Artificial Sequence
  Pole.4_NTC.9
  crRNA array
  misc_feature (148)..(157): n is a, c, g, or t
cttggctttatatatcttgtggaaaggacgaaacaccgtaatttctactaagtgtagatgggagatgatatagcggcagtaatttctactaagtgtagatatcgccgtacggctatggcataatttctactaagtgtagatttttttnnnnnnnnnnaagcttggcgtggatccgatatcaactagatcttgagacaaatggcagtattcatccacaattttaaaagaaaaggggggattggggggtacagtgcaggggaaagaatagtagacataatagcaacagacatacaaactaaag

SEQ ID NO: 18914 - DNA, 301 bp, Artificial Sequence
  Pten.1_NTC.0
  crRNA array
  misc_feature (148)..(157): n is a, c, g, or t
cttggctttatatatcttgtggaaaggacgaaacaccgtaatttctactaagtgtagataagcgtggtgcgtgacgcactaatttctactaagtgtagattatagcgtcgcgcgctaatttaatttctactaagtgtagatttttttnnnnnnnnnnaagcttggcgtggatccgatatcaactagatcttgagacaaatggcagtattcatccacaattttaaaagaaaaggggggattggggggtacagtgcaggggaaagaatagtagacataatagcaacagacatacaaactaaag

SEQ ID NO: 18915 - DNA, 301 bp, Artificial Sequence
  Pten.1_NTC.1
  crRNA array
  misc_feature (148)..(157): n is a, c, g, or t
cttggctttatatatcttgtggaaaggacgaaacaccgtaatttctactaagtgtagataagcgtggtgcgtgacgcactaatttctactaagtgtagatcgcgtaaccgttccggctcctaatttctactaagtgtagatttttttnnnnnnnnnnaagcttggcgtggatccgatatcaactagatcttgagacaaatggcagtattcatccacaattttaaaagaaaaggggggattggggggtacagtgcaggggaaagaatagtagacataatagcaacagacatacaaactaaag

SEQ ID NO: 18916 - DNA, 301 bp, Artificial Sequence
  Pten.1_NTC.10
  crRNA array
  misc_feature (148)..(157): n is a, c, g, or t
cttggctttatatatcttgtggaaaggacgaaacaccgtaatttctactaagtgtagataagcgtggtgcgtgacgcactaatttctactaagtgtagatcgctaagttcgcgcgggccgtaatttctactaagtgtagatttttttnnnnnnnnnnaagcttggcgtggatccgatatcaactagatcttgagacaaatggcagtattcatccacaattttaaaagaaaaggggggattggggggtacagtgcaggggaaagaatagtagacataatagcaacagacatacaaactaaag

SEQ ID NO: 18917 - DNA, 301 bp, Artificial Sequence
  Pten.1_NTC.11
  crRNA array
  misc_feature (148)..(157): n is a, c, g, or t
cttggctttatatatcttgtggaaaggacgaaacaccgtaatttctactaagtgtagataagcgtggtgcgtgacgcactaatttctactaagtgtagatcgttcgtcgacgaagcaatctaatttctactaagtgtagatttttttnnnnnnnnnnaagcttggcgtggatccgatatcaactagatcttgagacaaatggcagtattcatccacaattttaaaagaaaaggggggattggggggtacagtgcaggggaaagaatagtagacataatagcaacagacatacaaactaaag

SEQ ID NO: 18918 - DNA, 301 bp, Artificial Sequence
  Pten.1_NTC.12
  crRNA array
  misc_feature (148)..(157): n is a, c, g, or t
cttggctttatatatcttgtggaaaggacgaaacaccgtaatttctactaagtgtagataagcgtggtgcgtgacgcactaatttctactaagtgtagatcgccgacgattaatcaatagtaatttctactaagtgtagatttttttnnnnnnnnnnaagcttggcgtggatccgatatcaactagatcttgagacaaatggcagtattcatccacaattttaaaagaaaaggggggattggggggtacagtgcaggggaaagaatagtagacataatagcaacagacatacaaactaaag

SEQ ID NO: 18919 - DNA, 301 bp, Artificial Sequence
  Pten.1_NTC.13
  crRNA array
  misc_feature (148)..(157): n is a, c, g, or t
cttggctttatatatcttgtggaaaggacgaaacaccgtaatttctactaagtgtagataagcgtggtgcgtgacgcactaatttctactaagtgtagatgaccgttgtatcgcgatcaataatttctactaagtgtagatttttttnnnnnnnnnnaagcttggcgtggatccgatatcaactagatcttgagacaaatggcagtattcatccacaattttaaaagaaaaggggggattggggggtacagtgcaggggaaagaatagtagacataatagcaacagacatacaaactaaag

SEQ ID NO: 18920 - DNA, 301 bp, Artificial Sequence
  Pten.1_NTC.14
  crRNA array
  misc_feature (148)..(157): n is a, c, g, or t
cttggctttatatatcttgtggaaaggacgaaacaccgtaatttctactaagtgtagataagcgtggtgcgtgacgcactaatttctactaagtgtagatccgttcgtgcgatagtgttttaatttctactaagtgtagatttttttnnnnnnnnnnaagcttggcgtggatccgatatcaactagatcttgagacaaatggcagtattcatccacaattttaaaagaaaaggggggattggggggtacagtgcaggggaaagaatagtagacataatagcaacagacatacaaactaaag

SEQ ID NO: 18921 - DNA, 301 bp, Artificial Sequence
  Pten.1_NTC.15
  crRNA array
  misc_feature (148)..(157): n is a, c, g, or t
cttggctttatatatcttgtggaaaggacgaaacaccgtaatttctactaagtgtagataagcgtggtgcgtgacgcactaatttctactaagtgtagatgttgtcgtgccgcgaatttataatttctactaagtgtagatttttttnnnnnnnnnnaagcttggcgtggatccgatatcaactagatcttgagacaaatggcagtattcatccacaattttaaaagaaaaggggggattggggggtacagtgcaggggaaagaatagtagacataatagcaacagacatacaaactaaag

SEQ ID NO: 18922 - DNA, 301 bp, Artificial Sequence
  Pten.1_NTC.16
  crRNA array
  misc_feature (148)..(157): n is a, c, g, or t
cttggctttatatatcttgtggaaaggacgaaacaccgtaatttctactaagtgtagataagcgtggtgcgtgacgcactaatttctactaagtgtagatcggtacgttagacgaaaatttaatttctactaagtgtagatttttttnnnnnnnnnnaagcttggcgtggatccgatatcaactagatcttgagacaaatggcagtattcatccacaattttaaaagaaaaggggggattggggggtacagtgcaggggaaagaatagtagacataatagcaacagacatacaaactaaag

SEQ ID NO: 18923 - DNA, 301 bp, Artificial Sequence
  Pten.1_NTC.17
  crRNA array
  misc_feature (148)..(157): n is a, c, g, or t
cttggctttatatatcttgtggaaaggacgaaacaccgtaatttctactaagtgtagataagcgtggtgcgtgacgcactaatttctactaagtgtagattatcgaacgctatcgaacgttaatttctactaagtgtagatttttttnnnnnnnnnnaagcttggcgtggatccgatatcaactagatcttgagacaaatggcagtattcatccacaattttaaaagaaaaggggggattggggggtacagtgcaggggaaagaatagtagacataatagcaacagacatacaaactaaag

SEQ ID NO: 18924 - DNA, 301 bp, Artificial Sequence
  Pten.1_NTC.18
  crRNA array
  misc_feature (148)..(157): n is a, c, g, or t
cttggctttatatatcttgtggaaaggacgaaacaccgtaatttctactaagtgtagataagcgtggtgcgtgacgcactaatttctactaagtgtagattccggttacgaccggcaaaataatttctactaagtgtagatttttttnnnnnnnnnnaagcttggcgtggatccgatatcaactagatcttgagacaaatggcagtattcatccacaattttaaaagaaaaggggggattggggggtacagtgcaggggaaagaatagtagacataatagcaacagacatacaaactaaag

SEQ ID NO: 18925 - DNA, 301 bp, Artificial Sequence
  Pten.1_NTC.19
  crRNA array
  misc_feature (148)..(157): n is a, c, g, or t
cttggctttatatatcttgtggaaaggacgaaacaccgtaatttctactaagtgtagataagcgtggtgcgtgacgcactaatttctactaagtgtagatcgtcgtagaacgatacccgataatttctactaagtgtagatttttttnnnnnnnnnnaagcttggcgtggatccgatatcaactagatcttgagacaaatggcagtattcatccacaattttaaaagaaaaggggggattggggggtacagtgcaggggaaagaatagtagacataatagcaacagacatacaaactaaag

SEQ ID NO: 18926 - DNA, 301 bp, Artificial Sequence
  Pten.1_NTC.2
  crRNA array
  misc_feature (148)..(157): n is a, c, g, or t
cttggctttatatatcttgtggaaaggacgaaacaccgtaatttctactaagtgtagataagcgtggtgcgtgacgcactaatttctactaagtgtagatttatgtcgcgccgcgacccgtaatttctactaagtgtagatttttttnnnnnnnnnnaagcttggcgtggatccgatatcaactagatcttgagacaaatggcagtattcatccacaattttaaaagaaaaggggggattggggggtacagtgcaggggaaagaatagtagacataatagcaacagacatacaaactaaag

SEQ ID NO: 18927 - DNA, 301 bp, Artificial Sequence
  Pten.1_NTC.20
  crRNA array
  misc_feature (148)..(157): n is a, c, g, or t
cttggctttatatatcttgtggaaaggacgaaacaccgtaatttctactaagtgtagataagcgtggtgcgtgacgcactaatttctactaagtgtagatattccggcgcgaccagaagataatttctactaagtgtagatttttttnnnnnnnnnnaagcttggcgtggatccgatatcaactagatcttgagacaaatggcagtattcatccacaattttaaaagaaaaggggggattggggggtacagtgcaggggaaagaatagtagacataatagcaacagacatacaaactaaag

SEQ ID NO: 18928 - DNA, 301 bp, Artificial Sequence
  Pten.1_NTC.21
  crRNA array
  misc_feature (148)..(157): n is a, c, g, or t
cttggctttatatatcttgtggaaaggacgaaacaccgtaatttctactaagtgtagataagcgtggtgcgtgacgcactaatttctactaagtgtagatgtataacttcgcgcggtccgtaatttctactaagtgtagatttttttnnnnnnnnnnaagcttggcgtggatccgatatcaactagatcttgagacaaatggcagtattcatccacaattttaaaagaaaaggggggattggggggtacagtgcaggggaaagaatagtagacataatagcaacagacatacaaactaaag

SEQ ID NO: 18929 - DNA, 301 bp, Artificial Sequence
  Pten.1_NTC.22
  crRNA array
  misc_feature (148)..(157): n is a, c, g, or t
cttggctttatatatcttgtggaaaggacgaaacaccgtaatttctactaagtgtagataagcgtggtgcgtgacgcactaatttctactaagtgtagatgcgcgtcaacgtaatgtgcctaatttctactaagtgtagatttttttnnnnnnnnnnaagcttggcgtggatccgatatcaactagatcttgagacaaatggcagtattcatccacaattttaaaagaaaaggggggattggggggtacagtgcaggggaaagaatagtagacataatagcaacagacatacaaactaaag

SEQ ID NO: 18930 - DNA, 301 bp, Artificial Sequence
  Pten.1_NTC.23
  crRNA array
  misc_feature (148)..(157): n is a, c, g, or t
cttggctttatatatcttgtggaaaggacgaaacaccgtaatttctactaagtgtagataagcgtggtgcgtgacgcactaatttctactaagtgtagatacgcgctattatcgtaggtgtaatttctactaagtgtagatttttttnnnnnnnnnnaagcttggcgtggatccgatatcaactagatcttgagacaaatggcagtattcatccacaattttaaaagaaaaggggggattggggggtacagtgcaggggaaagaatagtagacataatagcaacagacatacaaactaaag

SEQ ID NO: 18931 - DNA, 301 bp, Artificial Sequence
  Pten.1_NTC.24
  crRNA array
  misc_feature (148)..(157): n is a, c, g, or t
cttggctttatatatcttgtggaaaggacgaaacaccgtaatttctactaagtgtagataagcgtggtgcgtgacgcactaatttctactaagtgtagatactatcgacgttcgtcccggtaatttctactaagtgtagatttttttnnnnnnnnnnaagcttggcgtggatccgatatcaactagatcttgagacaaatggcagtattcatccacaattttaaaagaaaaggggggattggggggtacagtgcaggggaaagaatagtagacataatagcaacagacatacaaactaaag

SEQ ID NO: 18932 - DNA, 301 bp, Artificial Sequence
  Pten.1_NTC.25
  crRNA array
  misc_feature (148)..(157): n is a, c, g, or t
cttggctttatatatcttgtggaaaggacgaaacaccgtaatttctactaagtgtagataagcgtggtgcgtgacgcactaatttctactaagtgtagattcgcgttatcgtgccgtgcgtaatttctactaagtgtagatttttttnnnnnnnnnnaagcttggcgtggatccgatatcaactagatcttgagacaaatggcagtattcatccacaattttaaaagaaaaggggggattggggggtacagtgcaggggaaagaatagtagacataatagcaacagacatacaaactaaag

SEQ ID NO: 18933 - DNA, 301 bp, Artificial Sequence
  Pten.1_NTC.26
  crRNA array
  misc_feature (148)..(157): n is a, c, g, or t
cttggctttatatatcttgtggaaaggacgaaacaccgtaatttctactaagtgtagataagcgtggtgcgtgacgcactaatttctactaagtgtagatcgcgacggcggttttaacactaatttctactaagtgtagatttttttnnnnnnnnnnaagcttggcgtggatccgatatcaactagatcttgagacaaatggcagtattcatccacaattttaaaagaaaaggggggattggggggtacagtgcaggggaaagaatagtagacataatagcaacagacatacaaactaaag

SEQ ID NO: 18934 - DNA, 301 bp, Artificial Sequence
  Pten.1_NTC.27
  crRNA array
  misc_feature (148)..(157): n is a, c, g, or t
cttggctttatatatcttgtggaaaggacgaaacaccgtaatttctactaagtgtagataagcgtggtgcgtgacgcactaatttctactaagtgtagatgtcgcgttgcgaccggcgcttaatttctactaagtgtagatttttttnnnnnnnnnnaagcttggcgtggatccgatatcaactagatcttgagacaaatggcagtattcatccacaattttaaaagaaaaggggggattggggggtacagtgcaggggaaagaatagtagacataatagcaacagacatacaaactaaag

SEQ ID NO: 18935 - DNA, 301 bp, Artificial Sequence
  Pten.1_NTC.28
  crRNA array
  misc_feature (148)..(157): n is a, c, g, or t
cttggctttatatatcttgtggaaaggacgaaacaccgtaatttctactaagtgtagataagcgtggtgcgtgacgcactaatttctactaagtgtagataccgctaatcggcgtaaacttaatttctactaagtgtagatttttttnnnnnnnnnnaagcttggcgtggatccgatatcaactagatcttgagacaaatggcagtattcatccacaattttaaaagaaaaggggggattggggggtacagtgcaggggaaagaatagtagacataatagcaacagacatacaaactaaag

SEQ ID NO: 18936 - DNA, 301 bp, Artificial Sequence
  Pten.1_NTC.29
  crRNA array
  misc_feature (148)..(157): n is a, c, g, or t
cttggctttatatatcttgtggaaaggacgaaacaccgtaatttctactaagtgtagataagcgtggtgcgtgacgcactaatttctactaagtgtagatcgcgatctataccgtctatataatttctactaagtgtagatttttttnnnnnnnnnnaagcttggcgtggatccgatatcaactagatcttgagacaaatggcagtattcatccacaattttaaaagaaaaggggggattggggggtacagtgcaggggaaagaatagtagacataatagcaacagacatacaaactaaag

SEQ ID NO: 18937 - DNA, 301 bp, Artificial Sequence
  Pten.1_NTC.3
  crRNA array
  misc_feature (148)..(157): n is a, c, g, or t
cttggctttatatatcttgtggaaaggacgaaacaccgtaatttctactaagtgtagataagcgtggtgcgtgacgcactaatttctactaagtgtagattcgacgcgagacgacgtacataatttctactaagtgtagatttttttnnnnnnnnnnaagcttggcgtggatccgatatcaactagatcttgagacaaatggcagtattcatccacaattttaaaagaaaaggggggattggggggtacagtgcaggggaaagaatagtagacataatagcaacagacatacaaactaaag

SEQ ID NO: 18938 - DNA, 301 bp, Artificial Sequence
  Pten.1_NTC.30
  crRNA array
  misc_feature (148)..(157): n is a, c, g, or t
cttggctttatatatcttgtggaaaggacgaaacaccgtaatttctactaagtgtagataagcgtggtgcgtgacgcactaatttctactaagtgtagatcgatcgtacgggtgtcctaataatttctactaagtgtagatttttttnnnnnnnnnnaagcttggcgtggatccgatatcaactagatcttgagacaaatggcagtattcatccacaattttaaaagaaaaggggggattggggggtacagtgcaggggaaagaatagtagacataatagcaacagacatacaaactaaag

SEQ ID NO: 18939 - DNA, 301 bp, Artificial Sequence
  Pten.1_NTC.31
  crRNA array
  misc_feature (148)..(157): n is a, c, g, or t
cttggctttatatatcttgtggaaaggacgaaacaccgtaatttctactaagtgtagataagcgtggtgcgtgacgcactaatttctactaagtgtagatgccgaccgcgtgattgtaggtaatttctactaagtgtagatttttttnnnnnnnnnnaagcttggcgtggatccgatatcaactagatcttgagacaaatggcagtattcatccacaattttaaaagaaaaggggggattggggggtacagtgcaggggaaagaatagtagacataatagcaacagacatacaaactaaag

SEQ ID NO: 18940 - DNA, 301 bp, Artificial Sequence
  Pten.1_NTC.32
  crRNA array
  misc_feature (148)..(157): n is a, c, g, or t
cttggctttatatatcttgtggaaaggacgaaacaccgtaatttctactaagtgtagataagcgtggtgcgtgacgcactaatttctactaagtgtagatgcacgttacgcccgggtcactaatttctactaagtgtagatttttttnnnnnnnnnnaagcttggcgtggatccgatatcaactagatcttgagacaaatggcagtattcatccacaattttaaaagaaaaggggggattggggggtacagtgcaggggaaagaatagtagacataatagcaacagacatacaaactaaag

SEQ ID NO: 18941 - DNA, 301 bp, Artificial Sequence
  Pten.1_NTC.33
  crRNA array
  misc_feature (148)..(157): n is a, c, g, or t
cttggctttatatatcttgtggaaaggacgaaacaccgtaatttctactaagtgtagataagcgtggtgcgtgacgcactaatttctactaagtgtagattaagcgaccgacgcattcgctaatttctactaagtgtagatttttttnnnnnnnnnnaagcttggcgtggatccgatatcaactagatcttgagacaaatggcagtattcatccacaattttaaaagaaaaggggggattggggggtacagtgcaggggaaagaatagtagacataatagcaacagacatacaaactaaag

SEQ ID NO: 18942 - DNA, 301 bp, Artificial Sequence
  Pten.1_NTC.34
  crRNA array
  misc_feature (148)..(157): n is a, c, g, or t
cttggctttatatatcttgtggaaaggacgaaacaccgtaatttctactaagtgtagataagcgtggtgcgtgacgcactaatttctactaagtgtagattagcgttcgacacgtgaaactaatttctactaagtgtagatttttttnnnnnnnnnnaagcttggcgtggatccgatatcaactagatcttgagacaaatggcagtattcatccacaattttaaaagaaaaggggggattggggggtacagtgcaggggaaagaatagtagacataatagcaacagacatacaaactaaag

SEQ ID NO: 18943 - DNA, 301 bp, Artificial Sequence
  Pten.1_NTC.35
  crRNA array
  misc_feature (148)..(157): n is a, c, g, or t
cttggctttatatatcttgtggaaaggacgaaacaccgtaatttctactaagtgtagataagcgtggtgcgtgacgcactaatttctactaagtgtagattggcgcgtaatcgctattcgtaatttctactaagtgtagatttttttnnnnnnnnnnaagcttggcgtggatccgatatcaactagatcttgagacaaatggcagtattcatccacaattttaaaagaaaaggggggattggggggtacagtgcaggggaaagaatagtagacataatagcaacagacatacaaactaaag

SEQ ID NO: 18944 - DNA, 301 bp, Artificial Sequence
  Pten.1_NTC.36
  crRNA array
  misc_feature (148)..(157): n is a, c, g, or t
cttggctttatatatcttgtggaaaggacgaaacaccgtaatttctactaagtgtagataagcgtggtgcgtgacgcactaatttctactaagtgtagatcaacccgccgtagcgggccttaatttctactaagtgtagatttttttnnnnnnnnnnaagcttggcgtggatccgatatcaactagatcttgagacaaatggcagtattcatccacaattttaaaagaaaaggggggattggggggtacagtgcaggggaaagaatagtagacataatagcaacagacatacaaactaaag

SEQ ID NO: 18945 - DNA, 301 bp, Artificial Sequence
  Pten.1_NTC.37
  crRNA array
  misc_feature (148)..(157): n is a, c, g, or t
cttggctttatatatcttgtggaaaggacgaaacaccgtaatttctactaagtgtagataagcgtggtgcgtgacgcactaatttctactaagtgtagattttgcgttgacgcgattacttaatttctactaagtgtagatttttttnnnnnnnnnnaagcttggcgtggatccgatatcaactagatcttgagacaaatggcagtattcatccacaattttaaaagaaaaggggggattggggggtacagtgcaggggaaagaatagtagacataatagcaacagacatacaaactaaag

SEQ ID NO: 18946 - DNA, 301 bp, Artificial Sequence
  Pten.1_NTC.38
  crRNA array
  misc_feature (148)..(157): n is a, c, g, or t
cttggctttatatatcttgtggaaaggacgaaacaccgtaatttctactaagtgtagataagcgtggtgcgtgacgcactaatttctactaagtgtagataacggagcgcgatactaccataatttctactaagtgtagatttttttnnnnnnnnnnaagcttggcgtggatccgatatcaactagatcttgagacaaatggcagtattcatccacaattttaaaagaaaaggggggattggggggtacagtgcaggggaaagaatagtagacataatagcaacagacatacaaactaaag

SEQ ID NO: 18947 - DNA, 301 bp, Artificial Sequence
  Pten.1_NTC.39
  crRNA array
  misc_feature (148)..(157): n is a, c, g, or t
cttggctttatatatcttgtggaaaggacgaaacaccgtaatttctactaagtgtagataagcgtggtgcgtgacgcactaatttctactaagtgtagatccggacgttataacgtttcttaatttctactaagtgtagatttttttnnnnnnnnnnaagcttggcgtggatccgatatcaactagatcttgagacaaatggcagtattcatccacaattttaaaagaaaaggggggattggggggtacagtgcaggggaaagaatagtagacataatagcaacagacatacaaactaaag

SEQ ID NO: 18948 - DNA, 301 bp, Artificial Sequence
  Pten.1_NTC.4
  crRNA array
  misc_feature (148)..(157): n is a, c, g, or t
cttggctttatatatcttgtggaaaggacgaaacaccgtaatttctactaagtgtagataagcgtggtgcgtgacgcactaatttctactaagtgtagatatacccgtcgcgaacgtgagtaatttctactaagtgtagatttttttnnnnnnnnnnaagcttggcgtggatccgatatcaactagatcttgagacaaatggcagtattcatccacaattttaaaagaaaaggggggattggggggtacagtgcaggggaaagaatagtagacataatagcaacagacatacaaactaaag

SEQ ID NO: 18949 - DNA, 301 bp, Artificial Sequence
  Pten.1_NTC.40
  crRNA array
  misc_feature (148)..(157): n is a, c, g, or t
cttggctttatatatcttgtggaaaggacgaaacaccgtaatttctactaagtgtagataagcgtggtgcgtgacgcactaatttctactaagtgtagatattcgcgaacccggccggaataatttctactaagtgtagatttttttnnnnnnnnnnaagcttggcgtggatccgatatcaactagatcttgagacaaatggcagtattcatccacaattttaaaagaaaaggggggattggggggtacagtgcaggggaaagaatagtagacataatagcaacagacatacaaactaaag

SEQ ID NO: 18950 - DNA, 301 bp, Artificial Sequence
  Pten.1_NTC.41
  crRNA array
  misc_feature (148)..(157): n is a, c, g, or t
cttggctttatatatcttgtggaaaggacgaaacaccgtaatttctactaagtgtagataagcgtggtgcgtgacgcactaatttctactaagtgtagatttgatggcgcgacgcgttattaatttctactaagtgtagatttttttnnnnnnnnnnaagcttggcgtggatccgatatcaactagatcttgagacaaatggcagtattcatccacaattttaaaagaaaaggggggattggggggtacagtgcaggggaaagaatagtagacataatagcaacagacatacaaactaaag

SEQ ID NO: 18951 - DNA, 301 bp, Artificial Sequence
  Pten.1_NTC.42
  crRNA array
  misc_feature (148)..(157): n is a, c, g, or t
cttggctttatatatcttgtggaaaggacgaaacaccgtaatttctactaagtgtagataagcgtggtgcgtgacgcactaatttctactaagtgtagatggtcaaatcgcggcgataactaatttctactaagtgtagatttttttnnnnnnnnnnaagcttggcgtggatccgatatcaactagatcttgagacaaatggcagtattcatccacaattttaaaagaaaaggggggattggggggtacagtgcaggggaaagaatagtagacataatagcaacagacatacaaactaaag

SEQ ID NO: 18952 - DNA, 301 bp, Artificial Sequence
  Pten.1_NTC.43
  crRNA array
  misc_feature (148)..(157): n is a, c, g, or t
cttggctttatatatcttgtggaaaggacgaaacaccgtaatttctactaagtgtagataagcgtggtgcgtgacgcactaatttctactaagtgtagatcgactcgcgcattgaactggtaatttctactaagtgtagatttttttnnnnnnnnnnaagcttggcgtggatccgatatcaactagatcttgagacaaatggcagtattcatccacaattttaaaagaaaaggggggattggggggtacagtgcaggggaaagaatagtagacataatagcaacagacatacaaactaaag

SEQ ID NO: 18953 - DNA, 301 bp, Artificial Sequence
  Pten.1_NTC.44
  crRNA array
  misc_feature (148)..(157): n is a, c, g, or t
cttggctttatatatcttgtggaaaggacgaaacaccgtaatttctactaagtgtagataagcgtggtgcgtgacgcactaatttctactaagtgtagatagcgtcgtacgatttatcgttaatttctactaagtgtagatttttttnnnnnnnnnnaagcttggcgtggatccgatatcaactagatcttgagacaaatggcagtattcatccacaattttaaaagaaaaggggggattggggggtacagtgcaggggaaagaatagtagacataatagcaacagacatacaaactaaag

SEQ ID NO: 18954 - DNA, 301 bp, Artificial Sequence
  Pten.1_NTC.45
  crRNA array
  misc_feature (148)..(157): n is a, c, g, or t
cttggctttatatatcttgtggaaaggacgaaacaccgtaatttctactaagtgtagataagcgtggtgcgtgacgcactaatttctactaagtgtagatcggaacgcgtgatactagggtaatttctactaagtgtagatttttttnnnnnnnnnnaagcttggcgtggatccgatatcaactagatcttgagacaaatggcagtattcatccacaattttaaaagaaaaggggggattggggggtacagtgcaggggaaagaatagtagacataatagcaacagacatacaaactaaag

SEQ ID NO: 18955 - DNA, 301 bp, Artificial Sequence
  Pten.1_NTC.46
  crRNA array
  misc_feature (148)..(157): n is a, c, g, or t
cttggctttatatatcttgtggaaaggacgaaacaccgtaatttctactaagtgtagataagcgtggtgcgtgacgcactaatttctactaagtgtagatagcgggtcgtagacgcgcggtaatttctactaagtgtagatttttttnnnnnnnnnnaagcttggcgtggatccgatatcaactagatcttgagacaaatggcagtattcatccacaattttaaaagaaaaggggggattggggggtacagtgcaggggaaagaatagtagacataatagcaacagacatacaaactaaag

SEQ ID NO: 18956 - DNA, 301 bp, Artificial Sequence
  Pten.1_NTC.47
  crRNA array
  misc_feature (148)..(157): n is a, c, g, or t
cttggctttatatatcttgtggaaaggacgaaacaccgtaatttctactaagtgtagataagcgtggtgcgtgacgcactaatttctactaagtgtagattctcgtatcgcgattgttaataatttctactaagtgtagatttttttnnnnnnnnnnaagcttggcgtggatccgatatcaactagatcttgagacaaatggcagtattcatccacaattttaaaagaaaaggggggattggggggtacagtgcaggggaaagaatagtagacataatagcaacagacatacaaactaaag

SEQ ID NO: 18957 - DNA, 301 bp, Artificial Sequence
  Pten.1_NTC.48
  crRNA array
  misc_feature (148)..(157): n is a, c, g, or t
cttggctttatatatcttgtggaaaggacgaaacaccgtaatttctactaagtgtagataagcgtggtgcgtgacgcactaatttctactaagtgtagatcggtcgactacggctgttagtaatttctactaagtgtagatttttttnnnnnnnnnnaagcttggcgtggatccgatatcaactagatcttgagacaaatggcagtattcatccacaattttaaaagaaaaggggggattggggggtacagtgcaggggaaagaatagtagacataatagcaacagacatacaaactaaag

SEQ ID NO: 18958 - DNA, 301 bp, Artificial Sequence
  Pten.1_NTC.49
  crRNA array
  misc_feature (148)..(157): n is a, c, g, or t
cttggctttatatatcttgtggaaaggacgaaacaccgtaatttctactaagtgtagataagcgtggtgcgtgacgcactaatttctactaagtgtagattcggggcgcgtcaactgaattaatttctactaagtgtagatttttttnnnnnnnnnnaagcttggcgtggatccgatatcaactagatcttgagacaaatggcagtattcatccacaattttaaaagaaaaggggggattggggggtacagtgcaggggaaagaatagtagacataatagcaacagacatacaaactaaag

SEQ ID NO: 18959 - DNA, 301 bp, Artificial Sequence
  Pten.1_NTC.5
  crRNA array
  misc_feature (148)..(157): n is a, c, g, or t
cttggctttatatatcttgtggaaaggacgaaacaccgtaatttctactaagtgtagataagcgtggtgcgtgacgcactaatttctactaagtgtagatgcttacgcgtcgcgaatgtataatttctactaagtgtagatttttttnnnnnnnnnnaagcttggcgtggatccgatatcaactagatcttgagacaaatggcagtattcatccacaattttaaaagaaaaggggggattggggggtacagtgcaggggaaagaatagtagacataatagcaacagacatacaaactaaag

SEQ ID NO: 18960 - DNA, 301 bp, Artificial Sequence
  Pten.1_NTC.50
  crRNA array
  misc_feature (148)..(157): n is a, c, g, or t
cttggctttatatatcttgtggaaaggacgaaacaccgtaatttctactaagtgtagataagcgtggtgcgtgacgcactaatttctactaagtgtagatattgccgctcgcgcaaaatctaatttctactaagtgtagatttttttnnnnnnnnnnaagcttggcgtggatccgatatcaactagatcttgagacaaatggcagtattcatccacaattttaaaagaaaaggggggattggggggtacagtgcaggggaaagaatagtagacataatagcaacagacatacaaactaaag

SEQ ID NO: 18961 - DNA, 301 bp, Artificial Sequence
  Pten.1_NTC.51
  crRNA array
  misc_feature (148)..(157): n is a, c, g, or t
cttggctttatatatcttgtggaaaggacgaaacaccgtaatttctactaagtgtagataagcgtggtgcgtgacgcactaatttctactaagtgtagattaacgcgcaacacgccaatgtaatttctactaagtgtagatttttttnnnnnnnnnnaagcttggcgtggatccgatatcaactagatcttgagacaaatggcagtattcatccacaattttaaaagaaaaggggggattggggggtacagtgcaggggaaagaatagtagacataatagcaacagacatacaaactaaag

SEQ ID NO: 18962 - DNA, 301 bp, Artificial Sequence
  Pten.1_NTC.6
  crRNA array
  misc_feature (148)..(157): n is a, c, g, or t
cttggctttatatatcttgtggaaaggacgaaacaccgtaatttctactaagtgtagataagcgtggtgcgtgacgcactaatttctactaagtgtagatcgaatcgcgcctacgggaattaatttctactaagtgtagatttttttnnnnnnnnnnaagcttggcgtggatccgatatcaactagatcttgagacaaatggcagtattcatccacaattttaaaagaaaaggggggattggggggtacagtgcaggggaaagaatagtagacataatagcaacagacatacaaactaaag

SEQ ID NO: 18963 - DNA, 301 bp, Artificial Sequence
  Pten.1_NTC.7
  crRNA array
  misc_feature (148)..(157): n is a, c, g, or t
cttggctttatatatcttgtggaaaggacgaaacaccgtaatttctactaagtgtagataagcgtggtgcgtgacgcactaatttctactaagtgtagatcgccgaacggataagactattaatttctactaagtgtagatttttttnnnnnnnnnnaagcttggcgtggatccgatatcaactagatcttgagacaaatggcagtattcatccacaattttaaaagaaaaggggggattggggggtacagtgcaggggaaagaatagtagacataatagcaacagacatacaaactaaag

SEQ ID NO: 18964 - DNA, 301 bp, Artificial Sequence
  Pten.1_NTC.8
  crRNA array
  misc_feature (148)..(157): n is a, c, g, or t
cttggctttatatatcttgtggaaaggacgaaacaccgtaatttctactaagtgtagataagcgtggtgcgtgacgcactaatttctactaagtgtagatcgaccgaggttacgctgggataatttctactaagtgtagatttttttnnnnnnnnnnaagcttggcgtggatccgatatcaactagatcttgagacaaatggcagtattcatccacaattttaaaagaaaaggggggattggggggtacagtgcaggggaaagaatagtagacataatagcaacagacatacaaactaaag

SEQ ID NO: 18965 - DNA, 301 bp, Artificial Sequence
  Pten.1_NTC.9
  crRNA array
  misc_feature (148)..(157): n is a, c, g, or t
cttggctttatatatcttgtggaaaggacgaaacaccgtaatttctactaagtgtagataagcgtggtgcgtgacgcactaatttctactaagtgtagatatcgccgtacggctatggcataatttctactaagtgtagatttttttnnnnnnnnnnaagcttggcgtggatccgatatcaactagatcttgagacaaatggcagtattcatccacaattttaaaagaaaaggggggattggggggtacagtgcaggggaaagaatagtagacataatagcaacagacatacaaactaaag

SEQ ID NO: 18966 - DNA, 301 bp, Artificial Sequence
  Pten.2_NTC.0
  crRNA array
  misc_feature (148)..(157): n is a, c, g, or t
cttggctttatatatcttgtggaaaggacgaaacaccgtaatttctactaagtgtagattgtcaccagctgaagtggcttaatttctactaagtgtagattatagcgtcgcgcgctaatttaatttctactaagtgtagatttttttnnnnnnnnnnaagcttggcgtggatccgatatcaactagatcttgagacaaatggcagtattcatccacaattttaaaagaaaaggggggattggggggtacagtgcaggggaaagaatagtagacataatagcaacagacatacaaactaaag

SEQ ID NO: 18967 - DNA, 301 bp, Artificial Sequence
  Pten.2_NTC.1
  crRNA array
  misc_feature (148)..(157): n is a, c, g, or t
cttggctttatatatcttgtggaaaggacgaaacaccgtaatttctactaagtgtagattgtcaccagctgaagtggcttaatttctactaagtgtagatcgcgtaaccgttccggctcctaatttctactaagtgtagatttttttnnnnnnnnnnaagcttggcgtggatccgatatcaactagatcttgagacaaatggcagtattcatccacaattttaaaagaaaaggggggattggggggtacagtgcaggggaaagaatagtagacataatagcaacagacatacaaactaaag

SEQ ID NO: 18968 - DNA, 301 bp, Artificial Sequence
  Pten.2_NTC.10
  crRNA array
  misc_feature (148)..(157): n is a, c, g, or t
cttggctttatatatcttgtggaaaggacgaaacaccgtaatttctactaagtgtagattgtcaccagctgaagtggcttaatttctactaagtgtagatcgctaagttcgcgcgggccgtaatttctactaagtgtagatttttttnnnnnnnnnnaagcttggcgtggatccgatatcaactagatcttgagacaaatggcagtattcatccacaattttaaaagaaaaggggggattggggggtacagtgcaggggaaagaatagtagacataatagcaacagacatacaaactaaag

SEQ ID NO: 18969 - DNA, 301 bp, Artificial Sequence
  Pten.2_NTC.11
  crRNA array
  misc_feature (148)..(157): n is a, c, g, or t
cttggctttatatatcttgtggaaaggacgaaacaccgtaatttctactaagtgtagattgtcaccagctgaagtggcttaatttctactaagtgtagatcgttcgtcgacgaagcaatctaatttctactaagtgtagatttttttnnnnnnnnnnaagcttggcgtggatccgatatcaactagatcttgagacaaatggcagtattcatccacaattttaaaagaaaaggggggattggggggtacagtgcaggggaaagaatagtagacataatagcaacagacatacaaactaaag

SEQ ID NO: 18970 - DNA, 301 bp, Artificial Sequence
  Pten.2_NTC.12
  crRNA array
  misc_feature (148)..(157): n is a, c, g, or t
cttggctttatatatcttgtggaaaggacgaaacaccgtaatttctactaagtgtagattgtcaccagctgaagtggcttaatttctactaagtgtagatcgccgacgattaatcaatagtaatttctactaagtgtagatttttttnnnnnnnnnnaagcttggcgtggatccgatatcaactagatcttgagacaaatggcagtattcatccacaattttaaaagaaaaggggggattggggggtacagtgcaggggaaagaatagtagacataatagcaacagacatacaaactaaag

SEQ ID NO: 18971 - DNA, 301 bp, Artificial Sequence
  Pten.2_NTC.13
  crRNA array
  misc_feature (148)..(157): n is a, c, g, or t
cttggctttatatatcttgtggaaaggacgaaacaccgtaatttctactaagtgtagattgtcaccagctgaagtggcttaatttctactaagtgtagatgaccgttgtatcgcgatcaataatttctactaagtgtagatttttttnnnnnnnnnnaagcttggcgtggatccgatatcaactagatcttgagacaaatggcagtattcatccacaattttaaaagaaaaggggggattggggggtacagtgcaggggaaagaatagtagacataatagcaacagacatacaaactaaag

SEQ ID NO: 18972 - DNA, 301 bp, Artificial Sequence
  Pten.2_NTC.14
  crRNA array
  misc_feature (148)..(157): n is a, c, g, or t
cttggctttatatatcttgtggaaaggacgaaacaccgtaatttctactaagtgtagattgtcaccagctgaagtggcttaatttctactaagtgtagatccgttcgtgcgatagtgttttaatttctactaagtgtagatttttttnnnnnnnnnnaagcttggcgtggatccgatatcaactagatcttgagacaaatggcagtattcatccacaattttaaaagaaaaggggggattggggggtacagtgcaggggaaagaatagtagacataatagcaacagacatacaaactaaag

SEQ ID NO: 18973 - DNA, 301 bp, Artificial Sequence
  Pten.2_NTC.15
  crRNA array
  misc_feature (148)..(157): n is a, c, g, or t
cttggctttatatatcttgtggaaaggacgaaacaccgtaatttctactaagtgtagattgtcaccagctgaagtggcttaatttctactaagtgtagatgttgtcgtgccgcgaatttataatttctactaagtgtagatttttttnnnnnnnnnnaagcttggcgtggatccgatatcaactagatcttgagacaaatggcagtattcatccacaattttaaaagaaaaggggggattggggggtacagtgcaggggaaagaatagtagacataatagcaacagacatacaaactaaag

SEQ ID NO: 18974 - DNA, 301 bp, Artificial Sequence
  Pten.2_NTC.16
  crRNA array
  misc_feature (148)..(157): n is a, c, g, or t
cttggctttatatatcttgtggaaaggacgaaacaccgtaatttctactaagtgtagattgtcaccagctgaagtggcttaatttctactaagtgtagatcggtacgttagacgaaaatttaatttctactaagtgtagatttttttnnnnnnnnnnaagcttggcgtggatccgatatcaactagatcttgagacaaatggcagtattcatccacaattttaaaagaaaaggggggattggggggtacagtgcaggggaaagaatagtagacataatagcaacagacatacaaactaaag

SEQ ID NO: 18975 - DNA, 301 bp, Artificial Sequence
  Pten.2_NTC.17
  crRNA array
  misc_feature (148)..(157): n is a, c, g, or t
cttggctttatatatcttgtggaaaggacgaaacaccgtaatttctactaagtgtagattgtcaccagctgaagtggcttaatttctactaagtgtagattatcgaacgctatcgaacgttaatttctactaagtgtagatttttttnnnnnnnnnnaagcttggcgtggatccgatatcaactagatcttgagacaaatggcagtattcatccacaattttaaaagaaaaggggggattggggggtacagtgcaggggaaagaatagtagacataatagcaacagacatacaaactaaag

SEQ ID NO: 18976 - DNA, 301 bp, Artificial Sequence
  Pten.2_NTC.18
  crRNA array
  misc_feature (148)..(157): n is a, c, g, or t
cttggctttatatatcttgtggaaaggacgaaacaccgtaatttctactaagtgtagattgtcaccagctgaagtggcttaatttctactaagtgtagattccggttacgaccggcaaaataatttctactaagtgtagatttttttnnnnnnnnnnaagcttggcgtggatccgatatcaactagatcttgagacaaatggcagtattcatccacaattttaaaagaaaaggggggattggggggtacagtgcaggggaaagaatagtagacataatagcaacagacatacaaactaaag

SEQ ID NO: 18977 - DNA, 301 bp, Artificial Sequence
  Pten.2_NTC.19
  crRNA array
  misc_feature (148)..(157): n is a, c, g, or t
cttggctttatatatcttgtggaaaggacgaaacaccgtaatttctactaagtgtagattgtcaccagctgaagtggcttaatttctactaagtgtagatcgtcgtagaacgatacccgataatttctactaagtgtagatttttttnnnnnnnnnnaagcttggcgtggatccgatatcaactagatcttgagacaaatggcagtattcatccacaattttaaaagaaaaggggggattggggggtacagtgcaggggaaagaatagtagacataatagcaacagacatacaaactaaag

SEQ ID NO: 18978 - DNA, 301 bp, Artificial Sequence
  Pten.2_NTC.2
  crRNA array
  misc_feature (148)..(157): n is a, c, g, or t
cttggctttatatatcttgtggaaaggacgaaacaccgtaatttctactaagtgtagattgtcaccagctgaagtggcttaatttctactaagtgtagatttatgtcgcgccgcgacccgtaatttctactaagtgtagatttttttnnnnnnnnnnaagcttggcgtggatccgatatcaactagatcttgagacaaatggcagtattcatccacaattttaaaagaaaaggggggattggggggtacagtgcaggggaaagaatagtagacataatagcaacagacatacaaactaaag

SEQ ID NO: 18979 - DNA, 301 bp, Artificial Sequence
  Pten.2_NTC.20
  crRNA array
  misc_feature (148)..(157): n is a, c, g, or t
cttggctttatatatcttgtggaaaggacgaaacaccgtaatttctactaagtgtagattgtcaccagctgaagtggcttaatttctactaagtgtagatattccggcgcgaccagaagataatttctactaagtgtagatttttttnnnnnnnnnnaagcttggcgtggatccgatatcaactagatcttgagacaaatggcagtattcatccacaattttaaaagaaaaggggggattggggggtacagtgcaggggaaagaatagtagacataatagcaacagacatacaaactaaag

SEQ ID NO: 18980 - DNA, 301 bp, Artificial Sequence
  Pten.2_NTC.21
  crRNA array
  misc_feature (148)..(157): n is a, c, g, or t
cttggctttatatatcttgtggaaaggacgaaacaccgtaatttctactaagtgtagattgtcaccagctgaagtggcttaatttctactaagtgtagatgtataacttcgcgcggtccgtaatttctactaagtgtagatttttttnnnnnnnnnnaagcttggcgtggatccgatatcaactagatcttgagacaaatggcagtattcatccacaattttaaaagaaaaggggggattggggggtacagtgcaggggaaagaatagtagacataatagcaacagacatacaaactaaag

SEQ ID NO: 18981 - DNA, 301 bp, Artificial Sequence
  Pten.2_NTC.22
  crRNA array
  misc_feature (148)..(157): n is a, c, g, or t
cttggctttatatatcttgtggaaaggacgaaacaccgtaatttctactaagtgtagattgtcaccagctgaagtggcttaatttctactaagtgtagatgcgcgtcaacgtaatgtgcctaatttctactaagtgtagatttttttnnnnnnnnnnaagcttggcgtggatccgatatcaactagatcttgagacaaatggcagtattcatccacaattttaaaagaaaaggggggattggggggtacagtgcaggggaaagaatagtagacataatagcaacagacatacaaactaaag

SEQ ID NO: 18982 - DNA, 301 bp, Artificial Sequence
  Pten.2_NTC.23
  crRNA array
  misc_feature (148)..(157): n is a, c, g, or t
cttggctttatatatcttgtggaaaggacgaaacaccgtaatttctactaagtgtagattgtcaccagctgaagtggcttaatttctactaagtgtagatacgcgctattatcgtaggtgtaatttctactaagtgtagatttttttnnnnnnnnnnaagcttggcgtggatccgatatcaactagatcttgagacaaatggcagtattcatccacaattttaaaagaaaaggggggattggggggtacagtgcaggggaaagaatagtagacataatagcaacagacatacaaactaaag

SEQ ID NO: 18983 - DNA, 301 bp, Artificial Sequence
  Pten.2_NTC.24
  crRNA array
  misc_feature (148)..(157): n is a, c, g, or t
cttggctttatatatcttgtggaaaggacgaaacaccgtaatttctactaagtgtagattgtcaccagctgaagtggcttaatttctactaagtgtagatactatcgacgttcgtcccggtaatttctactaagtgtagatttttttnnnnnnnnnnaagcttggcgtggatccgatatcaactagatcttgagacaaatggcagtattcatccacaattttaaaagaaaaggggggattggggggtacagtgcaggggaaagaatagtagacataatagcaacagacatacaaactaaag

SEQ ID NO: 18984 - DNA, 301 bp, Artificial Sequence
  Pten.2_NTC.25
  crRNA array
  misc_feature (148)..(157): n is a, c, g, or t
cttggctttatatatcttgtggaaaggacgaaacaccgtaatttctactaagtgtagattgtcaccagctgaagtggcttaatttctactaagtgtagattcgcgttatcgtgccgtgcgtaatttctactaagtgtagatttttttnnnnnnnnnnaagcttggcgtggatccgatatcaactagatcttgagacaaatggcagtattcatccacaattttaaaagaaaaggggggattggggggtacagtgcaggggaaagaatagtagacataatagcaacagacatacaaactaaag

SEQ ID NO: 18985 - DNA, 301 bp, Artificial Sequence
  Pten.2_NTC.26
  crRNA array
  misc_feature (148)..(157): n is a, c, g, or t
cttggctttatatatcttgtggaaaggacgaaacaccgtaatttctactaagtgtagattgtcaccagctgaagtggcttaatttctactaagtgtagatcgcgacggcggttttaacactaatttctactaagtgtagatttttttnnnnnnnnnnaagcttggcgtggatccgatatcaactagatcttgagacaaatggcagtattcatccacaattttaaaagaaaaggggggattggggggtacagtgcaggggaaagaatagtagacataatagcaacagacatacaaactaaag

SEQ ID NO: 18986 - DNA, 301 bp, Artificial Sequence
  Pten.2_NTC.27
  crRNA array
  misc_feature (148)..(157): n is a, c, g, or t
cttggctttatatatcttgtggaaaggacgaaacaccgtaatttctactaagtgtagattgtcaccagctgaagtggcttaatttctactaagtgtagatgtcgcgttgcgaccggcgcttaatttctactaagtgtagatttttttnnnnnnnnnnaagcttggcgtggatccgatatcaactagatcttgagacaaatggcagtattcatccacaattttaaaagaaaaggggggattggggggtacagtgcaggggaaagaatagtagacataatagcaacagacatacaaactaaag

SEQ ID NO: 18987 - DNA, 301 bp, Artificial Sequence
  Pten.2_NTC.28
  crRNA array
  misc_feature (148)..(157): n is a, c, g, or t
cttggctttatatatcttgtggaaaggacgaaacaccgtaatttctactaagtgtagattgtcaccagctgaagtggcttaatttctactaagtgtagataccgctaatcggcgtaaacttaatttctactaagtgtagatttttttnnnnnnnnnnaagcttggcgtggatccgatatcaactagatcttgagacaaatggcagtattcatccacaattttaaaagaaaaggggggattggggggtacagtgcaggggaaagaatagtagacataatagcaacagacatacaaactaaag

SEQ ID NO: 18988 - DNA, 301 bp, Artificial Sequence
  Pten.2_NTC.29
  crRNA array
  misc_feature (148)..(157): n is a, c, g, or t
cttggctttatatatcttgtggaaaggacgaaacaccgtaatttctactaagtgtagattgtcaccagctgaagtggcttaatttctactaagtgtagatcgcgatctataccgtctatataatttctactaagtgtagatttttttnnnnnnnnnnaagcttggcgtggatccgatatcaactagatcttgagacaaatggcagtattcatccacaattttaaaagaaaaggggggattggggggtacagtgcaggggaaagaatagtagacataatagcaacagacatacaaactaaag

SEQ ID NO: 18989 - DNA, 301 bp, Artificial Sequence
  Pten.2_NTC.3
  crRNA array
  misc_feature (148)..(157): n is a, c, g, or t
cttggctttatatatcttgtggaaaggacgaaacaccgtaatttctactaagtgtagattgtcaccagctgaagtggcttaatttctactaagtgtagattcgacgcgagacgacgtacataatttctactaagtgtagatttttttnnnnnnnnnnaagcttggcgtggatccgatatcaactagatcttgagacaaatggcagtattcatccacaattttaaaagaaaaggggggattggggggtacagtgcaggggaaagaatagtagacataatagcaacagacatacaaactaaag

SEQ ID NO: 18990 - DNA, 301 bp, Artificial Sequence
  Pten.2_NTC.30
  crRNA array
  misc_feature (148)..(157): n is a, c, g, or t
cttggctttatatatcttgtggaaaggacgaaacaccgtaatttctactaagtgtagattgtcaccagctgaagtggcttaatttctactaagtgtagatcgatcgtacgggtgtcctaataatttctactaagtgtagatttttttnnnnnnnnnnaagcttggcgtggatccgatatcaactagatcttgagacaaatggcagtattcatccacaattttaaaagaaaaggggggattggggggtacagtgcaggggaaagaatagtagacataatagcaacagacatacaaactaaag

SEQ ID NO: 18991 - DNA, 301 bp, Artificial Sequence
  Pten.2_NTC.31
  crRNA array
  misc_feature (148)..(157): n is a, c, g, or t
cttggctttatatatcttgtggaaaggacgaaacaccgtaatttctactaagtgtagattgtcaccagctgaagtggcttaatttctactaagtgtagatgccgaccgcgtgattgtaggtaatttctactaagtgtagatttttttnnnnnnnnnnaagcttggcgtggatccgatatcaactagatcttgagacaaatggcagtattcatccacaattttaaaagaaaaggggggattggggggtacagtgcaggggaaagaatagtagacataatagcaacagacatacaaactaaag

SEQ ID NO: 18992 - DNA, 301 bp, Artificial Sequence
  Pten.2_NTC.32
  crRNA array
  misc_feature (148)..(157): n is a, c, g, or t
cttggctttatatatcttgtggaaaggacgaaacaccgtaatttctactaagtgtagattgtcaccagctgaagtggcttaatttctactaagtgtagatgcacgttacgcccgggtcactaatttctactaagtgtagatttttttnnnnnnnnnnaagcttggcgtggatccgatatcaactagatcttgagacaaatggcagtattcatccacaattttaaaagaaaaggggggattggggggtacagtgcaggggaaagaatagtagacataatagcaacagacatacaaactaaag

SEQ ID NO: 18993 - DNA, 301 bp, Artificial Sequence
  Pten.2_NTC.33
  crRNA array
  misc_feature (148)..(157): n is a, c, g, or t
cttggctttatatatcttgtggaaaggacgaaacaccgtaatttctactaagtgtagattgtcaccagctgaagtggcttaatttctactaagtgtagattaagcgaccgacgcattcgctaatttctactaagtgtagatttttttnnnnnnnnnnaagcttggcgtggatccgatatcaactagatcttgagacaaatggcagtattcatccacaattttaaaagaaaaggggggattggggggtacagtgcaggggaaagaatagtagacataatagcaacagacatacaaactaaag

SEQ ID NO: 18994 - DNA, 301 bp, Artificial Sequence
  Pten.2_NTC.34
  crRNA array
  misc_feature (148)..(157): n is a, c, g, or t
cttggctttatatatcttgtggaaaggacgaaacaccgtaatttctactaagtgtagattgtcaccagctgaagtggcttaatttctactaagtgtagattagcgttcgacacgtgaaactaatttctactaagtgtagatttttttnnnnnnnnnnaagcttggcgtggatccgatatcaactagatcttgagacaaatggcagtattcatccacaattttaaaagaaaaggggggattggggggtacagtgcaggggaaagaatagtagacataatagcaacagacatacaaactaaag

SEQ ID NO: 18995 - DNA, 301 bp, Artificial Sequence
  Pten.2_NTC.35
  crRNA array
  misc_feature (148)..(157): n is a, c, g, or t
cttggctttatatatcttgtggaaaggacgaaacaccgtaatttctactaagtgtagattgtcaccagctgaagtggcttaatttctactaagtgtagattggcgcgtaatcgctattcgtaatttctactaagtgtagatttttttnnnnnnnnnnaagcttggcgtggatccgatatcaactagatcttgagacaaatggcagtattcatccacaattttaaaagaaaaggggggattggggggtacagtgcaggggaaagaatagtagacataatagcaacagacatacaaactaaag

SEQ ID NO: 18996 - DNA, 301 bp, Artificial Sequence
  Pten.2_NTC.36
  crRNA array
  misc_feature (148)..(157): n is a, c, g, or t
cttggctttatatatcttgtggaaaggacgaaacaccgtaatttctactaagtgtagattgtcaccagctgaagtggcttaatttctactaagtgtagatcaacccgccgtagcgggccttaatttctactaagtgtagatttttttnnnnnnnnnnaagcttggcgtggatccgatatcaactagatcttgagacaaatggcagtattcatccacaattttaaaagaaaaggggggattggggggtacagtgcaggggaaagaatagtagacataatagcaacagacatacaaactaaag

SEQ ID NO: 18997 - DNA, 301 bp, Artificial Sequence
  Pten.2_NTC.37
  crRNA array
  misc_feature (148)..(157): n is a, c, g, or t
cttggctttatatatcttgtggaaaggacgaaacaccgtaatttctactaagtgtagattgtcaccagctgaagtggcttaatttctactaagtgtagattttgcgttgacgcgattacttaatttctactaagtgtagatttttttnnnnnnnnnnaagcttggcgtggatccgatatcaactagatcttgagacaaatggcagtattcatccacaattttaaaagaaaaggggggattggggggtacagtgcaggggaaagaatagtagacataatagcaacagacatacaaactaaag

SEQ ID NO: 18998 - DNA, 301 bp, Artificial Sequence
  Pten.2_NTC.38
  crRNA array
  misc_feature (148)..(157): n is a, c, g, or t
cttggctttatatatcttgtggaaaggacgaaacaccgtaatttctactaagtgtagattgtcaccagctgaagtggcttaatttctactaagtgtagataacggagcgcgatactaccataatttctactaagtgtagatttttttnnnnnnnnnnaagcttggcgtggatccgatatcaactagatcttgagacaaatggcagtattcatccacaattttaaaagaaaaggggggattggggggtacagtgcaggggaaagaatagtagacataatagcaacagacatacaaactaaag

SEQ ID NO: 18999 - DNA, 301 bp, Artificial Sequence
  Pten.2_NTC.39
  crRNA array
  misc_feature (148)..(157): n is a, c, g, or t
cttggctttatatatcttgtggaaaggacgaaacaccgtaatttctactaagtgtagattgtcaccagctgaagtggcttaatttctactaagtgtagatccggacgttataacgtttcttaatttctactaagtgtagatttttttnnnnnnnnnnaagcttggcgtggatccgatatcaactagatcttgagacaaatggcagtattcatccacaattttaaaagaaaaggggggattggggggtacagtgcaggggaaagaatagtagacataatagcaacagacatacaaactaaag

SEQ ID NO: 19000 - DNA, 301 bp, Artificial Sequence
  Pten.2_NTC.4
  crRNA array
  misc_feature (148)..(157): n is a, c, g, or t
cttggctttatatatcttgtggaaaggacgaaacaccgtaatttctactaagtgtagattgtcaccagctgaagtggcttaatttctactaagtgtagatatacccgtcgcgaacgtgagtaatttctactaagtgtagatttttttnnnnnnnnnnaagcttggcgtggatccgatatcaactagatcttgagacaaatggcagtattcatccacaattttaaaagaaaaggggggattggggggtacagtgcaggggaaagaatagtagacataatagcaacagacatacaaactaaag

SEQ ID NO: 19001 - DNA, 301 bp, Artificial Sequence
  Pten.2_NTC.40
  crRNA array
  misc_feature (148)..(157): n is a, c, g, or t
cttggctttatatatcttgtggaaaggacgaaacaccgtaatttctactaagtgtagattgtcaccagctgaagtggcttaatttctactaagtgtagatattcgcgaacccggccggaataatttctactaagtgtagatttttttnnnnnnnnnnaagcttggcgtggatccgatatcaactagatcttgagacaaatggcagtattcatccacaattttaaaagaaaaggggggattggggggtacagtgcaggggaaagaatagtagacataatagcaacagacatacaaactaaag

SEQ ID NO: 19002 - DNA, 301 bp, Artificial Sequence
  Pten.2_NTC.41
  crRNA array
  misc_feature (148)..(157): n is a, c, g, or t
cttggctttatatatcttgtggaaaggacgaaacaccgtaatttctactaagtgtagattgtcaccagctgaagtggcttaatttctactaagtgtagatttgatggcgcgacgcgttattaatttctactaagtgtagatttttttnnnnnnnnnnaagcttggcgtggatccgatatcaactagatcttgagacaaatggcagtattcatccacaattttaaaagaaaaggggggattggggggtacagtgcaggggaaagaatagtagacataatagcaacagacatacaaactaaag

SEQ ID NO: 19003 - DNA, 301 bp, Artificial Sequence
  Pten.2_NTC.42
  crRNA array
  misc_feature (148)..(157): n is a, c, g, or t
cttggctttatatatcttgtggaaaggacgaaacaccgtaatttctactaagtgtagattgtcaccagctgaagtggcttaatttctactaagtgtagatggtcaaatcgcggcgataactaatttctactaagtgtagatttttttnnnnnnnnnnaagcttggcgtggatccgatatcaactagatcttgagacaaatggcagtattcatccacaattttaaaagaaaaggggggattggggggtacagtgcaggggaaagaatagtagacataatagcaacagacatacaaactaaag

SEQ ID NO: 19004 - DNA, 301 bp, Artificial Sequence
  Pten.2_NTC.43
  crRNA array
  misc_feature (148)..(157): n is a, c, g, or t
cttggctttatatatcttgtggaaaggacgaaacaccgtaatttctactaagtgtagattgtcaccagctgaagtggcttaatttctactaagtgtagatcgactcgcgcattgaactggtaatttctactaagtgtagatttttttnnnnnnnnnnaagcttggcgtggatccgatatcaactagatcttgagacaaatggcagtattcatccacaattttaaaagaaaaggggggattggggggtacagtgcaggggaaagaatagtagacataatagcaacagacatacaaactaaag

SEQ ID NO: 19005 - DNA, 301 bp, Artificial Sequence
  Pten.2_NTC.44
  crRNA array
  misc_feature (148)..(157): n is a, c, g, or t
cttggctttatatatcttgtggaaaggacgaaacaccgtaatttctactaagtgtagattgtcaccagctgaagtggcttaatttctactaagtgtagatagcgtcgtacgatttatcgttaatttctactaagtgtagatttttttnnnnnnnnnnaagcttggcgtggatccgatatcaactagatcttgagacaaatggcagtattcatccacaattttaaaagaaaaggggggattggggggtacagtgcaggggaaagaatagtagacataatagcaacagacatacaaactaaag

SEQ ID NO: 19006 - DNA, 301 bp, Artificial Sequence
  Pten.2_NTC.45
  crRNA array
  misc_feature (148)..(157): n is a, c, g, or t
cttggctttatatatcttgtggaaaggacgaaacaccgtaatttctactaagtgtagattgtcaccagctgaagtggcttaatttctactaagtgtagatcggaacgcgtgatactagggtaatttctactaagtgtagatttttttnnnnnnnnnnaagcttggcgtggatccgatatcaactagatcttgagacaaatggcagtattcatccacaattttaaaagaaaaggggggattggggggtacagtgcaggggaaagaatagtagacataatagcaacagacatacaaactaaag

SEQ ID NO: 19007 - DNA, 301 bp, Artificial Sequence
  Pten.2_NTC.46
  crRNA array
  misc_feature (148)..(157): n is a, c, g, or t
cttggctttatatatcttgtggaaaggacgaaacaccgtaatttctactaagtgtagattgtcaccagctgaagtggcttaatttctactaagtgtagatagcgggtcgtagacgcgcggtaatttctactaagtgtagatttttttnnnnnnnnnnaagcttggcgtggatccgatatcaactagatcttgagacaaatggcagtattcatccacaattttaaaagaaaaggggggattggggggtacagtgcaggggaaagaatagtagacataatagcaacagacatacaaactaaag

SEQ ID NO: 19008 - DNA, 301 bp, Artificial Sequence
  Pten.2_NTC.47
  crRNA array
  misc_feature (148)..(157): n is a, c, g, or t
cttggctttatatatcttgtggaaaggacgaaacaccgtaatttctactaagtgtagattgtcaccagctgaagtggcttaatttctactaagtgtagattctcgtatcgcgattgttaataatttctactaagtgtagatttttttnnnnnnnnnnaagcttggcgtggatccgatatcaactagatcttgagacaaatggcagtattcatccacaattttaaaagaaaaggggggattggggggtacagtgcaggggaaagaatagtagacataatagcaacagacatacaaactaaag

SEQ ID NO: 19009 - DNA, 301 bp, Artificial Sequence
  Pten.2_NTC.48
  crRNA array
  misc_feature (148)..(157): n is a, c, g, or t
cttggctttatatatcttgtggaaaggacgaaacaccgtaatttctactaagtgtagattgtcaccagctgaagtggcttaatttctactaagtgtagatcggtcgactacggctgttagtaatttctactaagtgtagatttttttnnnnnnnnnnaagcttggcgtggatccgatatcaactagatcttgagacaaatggcagtattcatccacaattttaaaagaaaaggggggattggggggtacagtgcaggggaaagaatagtagacataatagcaacagacatacaaactaaag

SEQ ID NO: 19010 - DNA, 301 bp, Artificial Sequence
  Pten.2_NTC.49
  crRNA array
  misc_feature (148)..(157): n is a, c, g, or t
cttggctttatatatcttgtggaaaggacgaaacaccgtaatttctactaagtgtagattgtcaccagctgaagtggcttaatttctactaagtgtagattcggggcgcgtcaactgaattaatttctactaagtgtagatttttttnnnnnnnnnnaagcttggcgtggatccgatatcaactagatcttgagacaaatggcagtattcatccacaattttaaaagaaaaggggggattggggggtacagtgcaggggaaagaatagtagacataatagcaacagacatacaaactaaag

SEQ ID NO: 19011 - DNA, 301 bp, Artificial Sequence
  Pten.2_NTC.5
  crRNA array
  misc_feature (148)..(157): n is a, c, g, or t
cttggctttatatatcttgtggaaaggacgaaacaccgtaatttctactaagtgtagattgtcaccagctgaagtggcttaatttctactaagtgtagatgcttacgcgtcgcgaatgtataatttctactaagtgtagatttttttnnnnnnnnnnaagcttggcgtggatccgatatcaactagatcttgagacaaatggcagtattcatccacaattttaaaagaaaaggggggattggggggtacagtgcaggggaaagaatagtagacataatagcaacagacatacaaactaaag

SEQ ID NO: 19012 - DNA, 301 bp, Artificial Sequence
  Pten.2_NTC.50
  crRNA array
  misc_feature (148)..(157): n is a, c, g, or t
cttggctttatatatcttgtggaaaggacgaaacaccgtaatttctactaagtgtagattgtcaccagctgaagtggcttaatttctactaagtgtagatattgccgctcgcgcaaaatctaatttctactaagtgtagatttttttnnnnnnnnnnaagcttggcgtggatccgatatcaactagatcttgagacaaatggcagtattcatccacaattttaaaagaaaaggggggattggggggtacagtgcaggggaaagaatagtagacataatagcaacagacatacaaactaaag

SEQ ID NO: 19013 - DNA, 301 bp, Artificial Sequence
  Pten.2_NTC.51
  crRNA array
  misc_feature (148)..(157): n is a, c, g, or t
cttggctttatatatcttgtggaaaggacgaaacaccgtaatttctactaagtgtagattgtcaccagctgaagtggcttaatttctactaagtgtagattaacgcgcaacacgccaatgtaatttctactaagtgtagatttttttnnnnnnnnnnaagcttggcgtggatccgatatcaactagatcttgagacaaatggcagtattcatccacaattttaaaagaaaaggggggattggggggtacagtgcaggggaaagaatagtagacataatagcaacagacatacaaactaaag

SEQ ID NO: 19014 - DNA, 301 bp, Artificial Sequence
  Pten.2_NTC.6
  crRNA array
  misc_feature (148)..(157): n is a, c, g, or t
cttggctttatatatcttgtggaaaggacgaaacaccgtaatttctactaagtgtagattgtcaccagctgaagtggcttaatttctactaagtgtagatcgaatcgcgcctacgggaattaatttctactaagtgtagatttttttnnnnnnnnnnaagcttggcgtggatccgatatcaactagatcttgagacaaatggcagtattcatccacaattttaaaagaaaaggggggattggggggtacagtgcaggggaaagaatagtagacataatagcaacagacatacaaactaaag

SEQ ID NO: 19015 - DNA, 301 bp, Artificial Sequence
  Pten.2_NTC.7
  crRNA array
  misc_feature (148)..(157): n is a, c, g, or t
cttggctttatatatcttgtggaaaggacgaaacaccgtaatttctactaagtgtagattgtcaccagctgaagtggcttaatttctactaagtgtagatcgccgaacggataagactattaatttctactaagtgtagatttttttnnnnnnnnnnaagcttggcgtggatccgatatcaactagatcttgagacaaatggcagtattcatccacaattttaaaagaaaaggggggattggggggtacagtgcaggggaaagaatagtagacataatagcaacagacatacaaactaaag

SEQ ID NO: 19016 - DNA, 301 bp, Artificial Sequence
  Pten.2_NTC.8
  crRNA array
  misc_feature (148)..(157): n is a, c, g, or t
cttggctttatatatcttgtggaaaggacgaaacaccgtaatttctactaagtgtagattgtcaccagctgaagtggcttaatttctactaagtgtagatcgaccgaggttacgctgggataatttctactaagtgtagatttttttnnnnnnnnnnaagcttggcgtggatccgatatcaactagatcttgagacaaatggcagtattcatccacaattttaaaagaaaaggggggattggggggtacagtgcaggggaaagaatagtagacataatagcaacagacatacaaactaaag

SEQ ID NO: 19017 - DNA, 301 bp, Artificial Sequence
  Pten.2_NTC.9
  crRNA array
  misc_feature (148)..(157): n is a, c, g, or t
cttggctttatatatcttgtggaaaggacgaaacaccgtaatttctactaagtgtagattgtcaccagctgaagtggcttaatttctactaagtgtagatatcgccgtacggctatggcataatttctactaagtgtagatttttttnnnnnnnnnnaagcttggcgtggatccgatatcaactagatcttgagacaaatggcagtattcatccacaattttaaaagaaaaggggggattggggggtacagtgcaggggaaagaatagtagacataatagcaacagacatacaaactaaag

SEQ ID NO: 19018 - DNA, 301 bp, Artificial Sequence
  Pten.3_NTC.0
  crRNA array
  misc_feature (148)..(157): n is a, c, g, or t
cttggctttatatatcttgtggaaaggacgaaacaccgtaatttctactaagtgtagatggagtcaagaggctgatttttaatttctactaagtgtagattatagcgtcgcgcgctaatttaatttctactaagtgtagatttttttnnnnnnnnnnaagcttggcgtggatccgatatcaactagatcttgagacaaatggcagtattcatccacaattttaaaagaaaaggggggattggggggtacagtgcaggggaaagaatagtagacataatagcaacagacatacaaactaaag

SEQ ID NO: 19019 - DNA, 301 bp, Artificial Sequence
  Pten.3_NTC.1
  crRNA array
  misc_feature (148)..(157): n is a, c, g, or t
cttggctttatatatcttgtggaaaggacgaaacaccgtaatttctactaagtgtagatggagtcaagaggctgatttttaatttctactaagtgtagatcgcgtaaccgttccggctcctaatttctactaagtgtagatttttttnnnnnnnnnnaagcttggcgtggatccgatatcaactagatcttgagacaaatggcagtattcatccacaattttaaaagaaaaggggggattggggggtacagtgcaggggaaagaatagtagacataatagcaacagacatacaaactaaag

SEQ ID NO: 19020 - DNA, 301 bp, Artificial Sequence
  Pten.3_NTC.10
  crRNA array
  misc_feature (148)..(157): n is a, c, g, or t
cttggctttatatatcttgtggaaaggacgaaacaccgtaatttctactaagtgtagatggagtcaagaggctgatttttaatttctactaagtgtagatcgctaagttcgcgcgggccgtaatttctactaagtgtagatttttttnnnnnnnnnnaagcttggcgtggatccgatatcaactagatcttgagacaaatggcagtattcatccacaattttaaaagaaaaggggggattggggggtacagtgcaggggaaagaatagtagacataatagcaacagacatacaaactaaag

SEQ ID NO: 19021 - DNA, 301 bp, Artificial Sequence
  Pten.3_NTC.11
  crRNA array
  misc_feature (148)..(157): n is a, c, g, or t
cttggctttatatatcttgtggaaaggacgaaacaccgtaatttctactaagtgtagatggagtcaagaggctgatttttaatttctactaagtgtagatcgttcgtcgacgaagcaatctaatttctactaagtgtagatttttttnnnnnnnnnnaagcttggcgtggatccgatatcaactagatcttgagacaaatggcagtattcatccacaattttaaaagaaaaggggggattggggggtacagtgcaggggaaagaatagtagacataatagcaacagacatacaaactaaag

SEQ ID NO: 19022 - DNA, 301 bp, Artificial Sequence
  Pten.3_NTC.12
  crRNA array
  misc_feature (148)..(157): n is a, c, g, or t
cttggctttatatatcttgtggaaaggacgaaacaccgtaatttctactaagtgtagatggagtcaagaggctgatttttaatttctactaagtgtagatcgccgacgattaatcaatagtaatttctactaagtgtagatttttttnnnnnnnnnnaagcttggcgtggatccgatatcaactagatcttgagacaaatggcagtattcatccacaattttaaaagaaaaggggggattggggggtacagtgcaggggaaagaatagtagacataatagcaacagacatacaaactaaag

SEQ ID NO: 19023 - DNA, 301 bp, Artificial Sequence
  Pten.3_NTC.13
  crRNA array
  misc_feature (148)..(157): n is a, c, g, or t
cttggctttatatatcttgtggaaaggacgaaacaccgtaatttctactaagtgtagatggagtcaagaggctgatttttaatttctactaagtgtagatgaccgttgtatcgcgatcaataatttctactaagtgtagatttttttnnnnnnnnnnaagcttggcgtggatccgatatcaactagatcttgagacaaatggcagtattcatccacaattttaaaagaaaaggggggattggggggtacagtgcaggggaaagaatagtagacataatagcaacagacatacaaactaaag

SEQ ID NO: 19024 - DNA, 301 bp, Artificial Sequence
  Pten.3_NTC.14
  crRNA array
  misc_feature (148)..(157): n is a, c, g, or t
cttggctttatatatcttgtggaaaggacgaaacaccgtaatttctactaagtgtagatggagtcaagaggctgatttttaatttctactaagtgtagatccgttcgtgcgatagtgttttaatttctactaagtgtagatttttttnnnnnnnnnnaagcttggcgtggatccgatatcaactagatcttgagacaaatggcagtattcatccacaattttaaaagaaaaggggggattggggggtacagtgcaggggaaagaatagtagacataatagcaacagacatacaaactaaag

SEQ ID NO: 19025 - DNA, 301 bp, Artificial Sequence
  Pten.3_NTC.15
  crRNA array
  misc_feature (148)..(157): n is a, c, g, or t
cttggctttatatatcttgtggaaaggacgaaacaccgtaatttctactaagtgtagatggagtcaagaggctgatttttaatttctactaagtgtagatgttgtcgtgccgcgaatttataatttctactaagtgtagatttttttnnnnnnnnnnaagcttggcgtggatccgatatcaactagatcttgagacaaatggcagtattcatccacaattttaaaagaaaaggggggattggggggtacagtgcaggggaaagaatagtagacataatagcaacagacatacaaactaaag

SEQ ID NO: 19026 - DNA, 301 bp, Artificial Sequence
  Pten.3_NTC.16
  crRNA array
  misc_feature (148)..(157): n is a, c, g, or t
cttggctttatatatcttgtggaaaggacgaaacaccgtaatttctactaagtgtagatggagtcaagaggctgatttttaatttctactaagtgtagatcggtacgttagacgaaaatttaatttctactaagtgtagatttttttnnnnnnnnnnaagcttggcgtggatccgatatcaactagatcttgagacaaatggcagtattcatccacaattttaaaagaaaaggggggattggggggtacagtgcaggggaaagaatagtagacataatagcaacagacatacaaactaaag

SEQ ID NO: 19027 - DNA, 301 bp, Artificial Sequence
  Pten.3_NTC.17
  crRNA array
  misc_feature (148)..(157): n is a, c, g, or t
cttggctttatatatcttgtggaaaggacgaaacaccgtaatttctactaagtgtagatggagtcaagaggctgatttttaatttctactaagtgtagattatcgaacgctatcgaacgttaatttctactaagtgtagatttttttnnnnnnnnnnaagcttggcgtggatccgatatcaactagatcttgagacaaatggcagtattcatccacaattttaaaagaaaaggggggattggggggtacagtgcaggggaaagaatagtagacataatagcaacagacatacaaactaaag

SEQ ID NO: 19028 - DNA, 301 bp, Artificial Sequence
  Pten.3_NTC.18
  crRNA array
  misc_feature (148)..(157): n is a, c, g, or t
cttggctttatatatcttgtggaaaggacgaaacaccgtaatttctactaagtgtagatggagtcaagaggctgatttttaatttctactaagtgtagattccggttacgaccggcaaaataatttctactaagtgtagatttttttnnnnnnnnnnaagcttggcgtggatccgatatcaactagatcttgagacaaatggcagtattcatccacaattttaaaagaaaaggggggattggggggtacagtgcaggggaaagaatagtagacataatagcaacagacatacaaactaaag

SEQ ID NO: 19029 - DNA, 301 bp, Artificial Sequence
  Pten.3_NTC.19
  crRNA array
  misc_feature (148)..(157): n is a, c, g, or t
cttggctttatatatcttgtggaaaggacgaaacaccgtaatttctactaagtgtagatggagtcaagaggctgatttttaatttctactaagtgtagatcgtcgtagaacgatacccgataatttctactaagtgtagatttttttnnnnnnnnnnaagcttggcgtggatccgatatcaactagatcttgagacaaatggcagtattcatccacaattttaaaagaaaaggggggattggggggtacagtgcaggggaaagaatagtagacataatagcaacagacatacaaactaaag

SEQ ID NO: 19030 - DNA, 301 bp, Artificial Sequence
  Pten.3_NTC.2
  crRNA array
  misc_feature (148)..(157): n is a, c, g, or t
cttggctttatatatcttgtggaaaggacgaaacaccgtaatttctactaagtgtagatggagtcaagaggctgatttttaatttctactaagtgtagatttatgtcgcgccgcgacccgtaatttctactaagtgtagatttttttnnnnnnnnnnaagcttggcgtggatccgatatcaactagatcttgagacaaatggcagtattcatccacaattttaaaagaaaaggggggattggggggtacagtgcaggggaaagaatagtagacataatagcaacagacatacaaactaaag

SEQ ID NO: 19031 - DNA, 301 bp, Artificial Sequence
  Pten.3_NTC.20
  crRNA array
  misc_feature (148)..(157): n is a, c, g, or t
cttggctttatatatcttgtggaaaggacgaaacaccgtaatttctactaagtgtagatggagtcaagaggctgatttttaatttctactaagtgtagatattccggcgcgaccagaagataatttctactaagtgtagatttttttnnnnnnnnnnaagcttggcgtggatccgatatcaactagatcttgagacaaatggcagtattcatccacaattttaaaagaaaaggggggattggggggtacagtgcaggggaaagaatagtagacataatagcaacagacatacaaactaaag

SEQ ID NO: 19032 - DNA, 301 bp, Artificial Sequence
  Pten.3_NTC.21
  crRNA array
  misc_feature (148)..(157): n is a, c, g, or t
cttggctttatatatcttgtggaaaggacgaaacaccgtaatttctactaagtgtagatggagtcaagaggctgatttttaatttctactaagtgtagatgtataacttcgcgcggtccgtaatttctactaagtgtagatttttttnnnnnnnnnnaagcttggcgtggatccgatatcaactagatcttgagacaaatggcagtattcatccacaattttaaaagaaaaggggggattggggggtacagtgcaggggaaagaatagtagacataatagcaacagacatacaaactaaag

SEQ ID NO: 19033 - DNA, 301 bp, Artificial Sequence
  Pten.3_NTC.22
  crRNA array
  misc_feature (148)..(157): n is a, c, g, or t
cttggctttatatatcttgtggaaaggacgaaacaccgtaatttctactaagtgtagatggagtcaagaggctgatttttaatttctactaagtgtagatgcgcgtcaacgtaatgtgcctaatttctactaagtgtagatttttttnnnnnnnnnnaagcttggcgtggatccgatatcaactagatcttgagacaaatggcagtattcatccacaattttaaaagaaaaggggggattggggggtacagtgcaggggaaagaatagtagacataatagcaacagacatacaaactaaag

SEQ ID NO: 19034 - DNA, 301 bp, Artificial Sequence
  Pten.3_NTC.23
  crRNA array
  misc_feature (148)..(157): n is a, c, g, or t
cttggctttatatatcttgtggaaaggacgaaacaccgtaatttctactaagtgtagatggagtcaagaggctgatttttaatttctactaagtgtagatacgcgctattatcgtaggtgtaatttctactaagtgtagatttttttnnnnnnnnnnaagcttggcgtggatccgatatcaactagatcttgagacaaatggcagtattcatccacaattttaaaagaaaaggggggattggggggtacagtgcaggggaaagaatagtagacataatagcaacagacatacaaactaaag

SEQ ID NO: 19035 - DNA, 301 bp, Artificial Sequence
  Pten.3_NTC.24
  crRNA array
  misc_feature (148)..(157): n is a, c, g, or t
cttggctttatatatcttgtggaaaggacgaaacaccgtaatttctactaagtgtagatggagtcaagaggctgatttttaatttctactaagtgtagatactatcgacgttcgtcccggtaatttctactaagtgtagatttttttnnnnnnnnnnaagcttggcgtggatccgatatcaactagatcttgagacaaatggcagtattcatccacaattttaaaagaaaaggggggattggggggtacagtgcaggggaaagaatagtagacataatagcaacagacatacaaactaaag

SEQ ID NO: 19036 - DNA, 301 bp, Artificial Sequence
  Pten.3_NTC.25
  crRNA array
  misc_feature (148)..(157): n is a, c, g, or t
cttggctttatatatcttgtggaaaggacgaaacaccgtaatttctactaagtgtagatggagtcaagaggctgatttttaatttctactaagtgtagattcgcgttatcgtgccgtgcgtaatttctactaagtgtagatttttttnnnnnnnnnnaagcttggcgtggatccgatatcaactagatcttgagacaaatggcagtattcatccacaattttaaaagaaaaggggggattggggggtacagtgcaggggaaagaatagtagacataatagcaacagacatacaaactaaag

SEQ ID NO: 19037 - DNA, 301 bp, Artificial Sequence
  Pten.3_NTC.26
  crRNA array
  misc_feature (148)..(157): n is a, c, g, or t
cttggctttatatatcttgtggaaaggacgaaacaccgtaatttctactaagtgtagatggagtcaagaggctgatttttaatttctactaagtgtagatcgcgacggcggttttaacactaatttctactaagtgtagatttttttnnnnnnnnnnaagcttggcgtggatccgatatcaactagatcttgagacaaatggcagtattcatccacaattttaaaagaaaaggggggattggggggtacagtgcaggggaaagaatagtagacataatagcaacagacatacaaactaaag

SEQ ID NO: 19038 - DNA, 301 bp, Artificial Sequence
  Pten.3_NTC.27
  crRNA array
  misc_feature (148)..(157): n is a, c, g, or t
cttggctttatatatcttgtggaaaggacgaaacaccgtaatttctactaagtgtagatggagtcaagaggctgatttttaatttctactaagtgtagatgtcgcgttgcgaccggcgcttaatttctactaagtgtagatttttttnnnnnnnnnnaagcttggcgtggatccgatatcaactagatcttgagacaaatggcagtattcatccacaattttaaaagaaaaggggggattggggggtacagtgcaggggaaagaatagtagacataatagcaacagacatacaaactaaag

SEQ ID NO: 19039 - DNA, 301 bp, Artificial Sequence
  Pten.3_NTC.28
  crRNA array
  misc_feature (148)..(157): n is a, c, g, or t
cttggctttatatatcttgtggaaaggacgaaacaccgtaatttctactaagtgtagatggagtcaagaggctgatttttaatttctactaagtgtagataccgctaatcggcgtaaacttaatttctactaagtgtagatttttttnnnnnnnnnnaagcttggcgtggatccgatatcaactagatcttgagacaaatggcagtattcatccacaattttaaaagaaaaggggggattggggggtacagtgcaggggaaagaatagtagacataatagcaacagacatacaaactaaag

SEQ ID NO: 19040 - DNA, 301 bp, Artificial Sequence
  Pten.3_NTC.29
  crRNA array
  misc_feature (148)..(157): n is a, c, g, or t
cttggctttatatatcttgtggaaaggacgaaacaccgtaatttctactaagtgtagatggagtcaagaggctgatttttaatttctactaagtgtagatcgcgatctataccgtctatataatttctactaagtgtagatttttttnnnnnnnnnnaagcttggcgtggatccgatatcaactagatcttgagacaaatggcagtattcatccacaattttaaaagaaaaggggggattggggggtacagtgcaggggaaagaatagtagacataatagcaacagacatacaaactaaag

SEQ ID NO: 19041 - DNA, 301 bp, Artificial Sequence
  Pten.3_NTC.3
  crRNA array
  misc_feature (148)..(157): n is a, c, g, or t
cttggctttatatatcttgtggaaaggacgaaacaccgtaatttctactaagtgtagatggagtcaagaggctgatttttaatttctactaagtgtagattcgacgcgagacgacgtacataatttctactaagtgtagatttttttnnnnnnnnnnaagcttggcgtggatccgatatcaactagatcttgagacaaatggcagtattcatccacaattttaaaagaaaaggggggattggggggtacagtgcaggggaaagaatagtagacataatagcaacagacatacaaactaaag

SEQ ID NO: 19042 - DNA, 301 bp, Artificial Sequence
  Pten.3_NTC.30
  crRNA array
  misc_feature (148)..(157): n is a, c, g, or t
cttggctttatatatcttgtggaaaggacgaaacaccgtaatttctactaagtgtagatggagtcaagaggctgatttttaatttctactaagtgtagatcgatcgtacgggtgtcctaataatttctactaagtgtagatttttttnnnnnnnnnnaagcttggcgtggatccgatatcaactagatcttgagacaaatggcagtattcatccacaattttaaaagaaaaggggggattggggggtacagtgcaggggaaagaatagtagacataatagcaacagacatacaaactaaag

SEQ ID NO: 19043 - DNA, 301 bp, Artificial Sequence
  Pten.3_NTC.31
  crRNA array
  misc_feature (148)..(157): n is a, c, g, or t
cttggctttatatatcttgtggaaaggacgaaacaccgtaatttctactaagtgtagatggagtcaagaggctgatttttaatttctactaagtgtagatgccgaccgcgtgattgtaggtaatttctactaagtgtagatttttttnnnnnnnnnnaagcttggcgtggatccgatatcaactagatcttgagacaaatggcagtattcatccacaattttaaaagaaaaggggggattggggggtacagtgcaggggaaagaatagtagacataatagcaacagacatacaaactaaag

SEQ ID NO: 19044 - DNA, 301 bp, Artificial Sequence
  Pten.3_NTC.32
  crRNA array
  misc_feature (148)..(157): n is a, c, g, or t
cttggctttatatatcttgtggaaaggacgaaacaccgtaatttctactaagtgtagatggagtcaagaggctgatttttaatttctactaagtgtagatgcacgttacgcccgggtcactaatttctactaagtgtagatttttttnnnnnnnnnnaagcttggcgtggatccgatatcaactagatcttgagacaaatggcagtattcatccacaattttaaaagaaaaggggggattggggggtacagtgcaggggaaagaatagtagacataatagcaacagacatacaaactaaag

SEQ ID NO: 19045 - DNA, 301 bp, Artificial Sequence
  Pten.3_NTC.33
  crRNA array
  misc_feature (148)..(157): n is a, c, g, or t
cttggctttatatatcttgtggaaaggacgaaacaccgtaatttctactaagtgtagatggagtcaagaggctgatttttaatttctactaagtgtagattaagcgaccgacgcattcgctaatttctactaagtgtagatttttttnnnnnnnnnnaagcttggcgtggatccgatatcaactagatcttgagacaaatggcagtattcatccacaattttaaaagaaaaggggggattggggggtacagtgcaggggaaagaatagtagacataatagcaacagacatacaaactaaag

SEQ ID NO: 19046 - DNA, 301 bp, Artificial Sequence
  Pten.3_NTC.34
  crRNA array
  misc_feature (148)..(157): n is a, c, g, or t
cttggctttatatatcttgtggaaaggacgaaacaccgtaatttctactaagtgtagatggagtcaagaggctgatttttaatttctactaagtgtagattagcgttcgacacgtgaaactaatttctactaagtgtagatttttttnnnnnnnnnnaagcttggcgtggatccgatatcaactagatcttgagacaaatggcagtattcatccacaattttaaaagaaaaggggggattggggggtacagtgcaggggaaagaatagtagacataatagcaacagacatacaaactaaag

SEQ ID NO: 19047 - DNA, 301 bp, Artificial Sequence
  Pten.3_NTC.35
  crRNA array
  misc_feature (148)..(157): n is a, c, g, or t
cttggctttatatatcttgtggaaaggacgaaacaccgtaatttctactaagtgtagatggagtcaagaggctgatttttaatttctactaagtgtagattggcgcgtaatcgctattcgtaatttctactaagtgtagatttttttnnnnnnnnnnaagcttggcgtggatccgatatcaactagatcttgagacaaatggcagtattcatccacaattttaaaagaaaaggggggattggggggtacagtgcaggggaaagaatagtagacataatagcaacagacatacaaactaaag

SEQ ID NO: 19048 - DNA, 301 bp, Artificial Sequence
  Pten.3_NTC.36
  crRNA array
  misc_feature (148)..(157): n is a, c, g, or t
cttggctttatatatcttgtggaaaggacgaaacaccgtaatttctactaagtgtagatggagtcaagaggctgatttttaatttctactaagtgtagatcaacccgccgtagcgggccttaatttctactaagtgtagatttttttnnnnnnnnnnaagcttggcgtggatccgatatcaactagatcttgagacaaatggcagtattcatccacaattttaaaagaaaaggggggattggggggtacagtgcaggggaaagaatagtagacataatagcaacagacatacaaactaaag

SEQ ID NO: 19049 - DNA, 301 bp, Artificial Sequence
  Pten.3_NTC.37
  crRNA array
  misc_feature (148)..(157): n is a, c, g, or t
cttggctttatatatcttgtggaaaggacgaaacaccgtaatttctactaagtgtagatggagtcaagaggctgatttttaatttctactaagtgtagattttgcgttgacgcgattacttaatttctactaagtgtagatttttttnnnnnnnnnnaagcttggcgtggatccgatatcaactagatcttgagacaaatggcagtattcatccacaattttaaaagaaaaggggggattggggggtacagtgcaggggaaagaatagtagacataatagcaacagacatacaaactaaag

SEQ ID NO: 19050 - DNA, 301 bp, Artificial Sequence
  Pten.3_NTC.38
  crRNA array
  misc_feature (148)..(157): n is a, c, g, or t
cttggctttatatatcttgtggaaaggacgaaacaccgtaatttctactaagtgtagatggagtcaagaggctgatttttaatttctactaagtgtagataacggagcgcgatactaccataatttctactaagtgtagatttttttnnnnnnnnnnaagcttggcgtggatccgatatcaactagatcttgagacaaatggcagtattcatccacaattttaaaagaaaaggggggattggggggtacagtgcaggggaaagaatagtagacataatagcaacagacatacaaactaaag

SEQ ID NO: 19051 - DNA, 301 bp, Artificial Sequence
  Pten.3_NTC.39
  crRNA array
  misc_feature (148)..(157): n is a, c, g, or t
cttggctttatatatcttgtggaaaggacgaaacaccgtaatttctactaagtgtagatggagtcaagaggctgatttttaatttctactaagtgtagatccggacgttataacgtttcttaatttctactaagtgtagatttttttnnnnnnnnnnaagcttggcgtggatccgatatcaactagatcttgagacaaatggcagtattcatccacaattttaaaagaaaaggggggattggggggtacagtgcaggggaaagaatagtagacataatagcaacagacatacaaactaaag

SEQ ID NO: 19052 - DNA, 301 bp, Artificial Sequence
  Pten.3_NTC.4
  crRNA array
  misc_feature (148)..(157): n is a, c, g, or t
cttggctttatatatcttgtggaaaggacgaaacaccgtaatttctactaagtgtagatggagtcaagaggctgatttttaatttctactaagtgtagatatacccgtcgcgaacgtgagtaatttctactaagtgtagatttttttnnnnnnnnnnaagcttggcgtggatccgatatcaactagatcttgagacaaatggcagtattcatccacaattttaaaagaaaaggggggattggggggtacagtgcaggggaaagaatagtagacataatagcaacagacatacaaactaaag

SEQ ID NO: 19053 - DNA, 301 bp, Artificial Sequence
  Pten.3_NTC.40
  crRNA array
  misc_feature (148)..(157): n is a, c, g, or t
cttggctttatatatcttgtggaaaggacgaaacaccgtaatttctactaagtgtagatggagtcaagaggctgatttttaatttctactaagtgtagatattcgcgaacccggccggaataatttctactaagtgtagatttttttnnnnnnnnnnaagcttggcgtggatccgatatcaactagatcttgagacaaatggcagtattcatccacaattttaaaagaaaaggggggattggggggtacagtgcaggggaaagaatagtagacataatagcaacagacatacaaactaaag

SEQ ID NO: 19054 - DNA, 301 bp, Artificial Sequence
  Pten.3_NTC.41
  crRNA array
  misc_feature (148)..(157): n is a, c, g, or t
cttggctttatatatcttgtggaaaggacgaaacaccgtaatttctactaagtgtagatggagtcaagaggctgatttttaatttctactaagtgtagatttgatggcgcgacgcgttattaatttctactaagtgtagatttttttnnnnnnnnnnaagcttggcgtggatccgatatcaactagatcttgagacaaatggcagtattcatccacaattttaaaagaaaaggggggattggggggtacagtgcaggggaaagaatagtagacataatagcaacagacatacaaactaaag

SEQ ID NO: 19055 - DNA, 301 bp, Artificial Sequence
  Pten.3_NTC.42
  crRNA array
  misc_feature (148)..(157): n is a, c, g, or t
cttggctttatatatcttgtggaaaggacgaaacaccgtaatttctactaagtgtagatggagtcaagaggctgatttttaatttctactaagtgtagatggtcaaatcgcggcgataactaatttctactaagtgtagatttttttnnnnnnnnnnaagcttggcgtggatccgatatcaactagatcttgagacaaatggcagtattcatccacaattttaaaagaaaaggggggattggggggtacagtgcaggggaaagaatagtagacataatagcaacagacatacaaactaaag

SEQ ID NO: 19056 - DNA, 301 bp, Artificial Sequence
  Pten.3_NTC.43
  crRNA array
  misc_feature (148)..(157): n is a, c, g, or t
cttggctttatatatcttgtggaaaggacgaaacaccgtaatttctactaagtgtagatggagtcaagaggctgatttttaatttctactaagtgtagatcgactcgcgcattgaactggtaatttctactaagtgtagatttttttnnnnnnnnnnaagcttggcgtggatccgatatcaactagatcttgagacaaatggcagtattcatccacaattttaaaagaaaaggggggattggggggtacagtgcaggggaaagaatagtagacataatagcaacagacatacaaactaaag

SEQ ID NO: 19057 - DNA, 301 bp, Artificial Sequence
  Pten.3_NTC.44
  crRNA array
  misc_feature (148)..(157): n is a, c, g, or t
cttggctttatatatcttgtggaaaggacgaaacaccgtaatttctactaagtgtagatggagtcaagaggctgatttttaatttctactaagtgtagatagcgtcgtacgatttatcgttaatttctactaagtgtagatttttttnnnnnnnnnnaagcttggcgtggatccgatatcaactagatcttgagacaaatggcagtattcatccacaattttaaaagaaaaggggggattggggggtacagtgcaggggaaagaatagtagacataatagcaacagacatacaaactaaag

SEQ ID NO: 19058 - DNA, 301 bp, Artificial Sequence
  Pten.3_NTC.45
  crRNA array
  misc_feature (148)..(157): n is a, c, g, or t
cttggctttatatatcttgtggaaaggacgaaacaccgtaatttctactaagtgtagatggagtcaagaggctgatttttaatttctactaagtgtagatcggaacgcgtgatactagggtaatttctactaagtgtagatttttttnnnnnnnnnnaagcttggcgtggatccgatatcaactagatcttgagacaaatggcagtattcatccacaattttaaaagaaaaggggggattggggggtacagtgcaggggaaagaatagtagacataatagcaacagacatacaaactaaag

SEQ ID NO: 19059 - DNA, 301 bp, Artificial Sequence
  Pten.3_NTC.46
  crRNA array
  misc_feature (148)..(157): n is a, c, g, or t
cttggctttatatatcttgtggaaaggacgaaacaccgtaatttctactaagtgtagatggagtcaagaggctgatttttaatttctactaagtgtagatagcgggtcgtagacgcgcggtaatttctactaagtgtagatttttttnnnnnnnnnnaagcttggcgtggatccgatatcaactagatcttgagacaaatggcagtattcatccacaattttaaaagaaaaggggggattggggggtacagtgcaggggaaagaatagtagacataatagcaacagacatacaaactaaag

SEQ ID NO: 19060 - DNA, 301 bp, Artificial Sequence
  Pten.3_NTC.47
  crRNA array
  misc_feature (148)..(157): n is a, c, g, or t
cttggctttatatatcttgtggaaaggacgaaacaccgtaatttctactaagtgtagatggagtcaagaggctgatttttaatttctactaagtgtagattctcgtatcgcgattgttaataatttctactaagtgtagatttttttnnnnnnnnnnaagcttggcgtggatccgatatcaactagatcttgagacaaatggcagtattcatccacaattttaaaagaaaaggggggattggggggtacagtgcaggggaaagaatagtagacataatagcaacagacatacaaactaaag

SEQ ID NO: 19061 - DNA, 301 bp, Artificial Sequence
  Pten.3_NTC.48
  crRNA array
  misc_feature (148)..(157): n is a, c, g, or t
cttggctttatatatcttgtggaaaggacgaaacaccgtaatttctactaagtgtagatggagtcaagaggctgatttttaatttctactaagtgtagatcggtcgactacggctgttagtaatttctactaagtgtagatttttttnnnnnnnnnnaagcttggcgtggatccgatatcaactagatcttgagacaaatggcagtattcatccacaattttaaaagaaaaggggggattggggggtacagtgcaggggaaagaatagtagacataatagcaacagacatacaaactaaag

SEQ ID NO: 19062 - DNA, 301 bp, Artificial Sequence
  Pten.3_NTC.49
  crRNA array
  misc_feature (148)..(157): n is a, c, g, or t
cttggctttatatatcttgtggaaaggacgaaacaccgtaatttctactaagtgtagatggagtcaagaggctgatttttaatttctactaagtgtagattcggggcgcgtcaactgaattaatttctactaagtgtagatttttttnnnnnnnnnnaagcttggcgtggatccgatatcaactagatcttgagacaaatggcagtattcatccacaattttaaaagaaaaggggggattggggggtacagtgcaggggaaagaatagtagacataatagcaacagacatacaaactaaag

SEQ ID NO: 19063 - DNA, 301 bp, Artificial Sequence
  Pten.3_NTC.5
  crRNA array
  misc_feature (148)..(157): n is a, c, g, or t
cttggctttatatatcttgtggaaaggacgaaacaccgtaatttctactaagtgtagatggagtcaagaggctgatttttaatttctactaagtgtagatgcttacgcgtcgcgaatgtataatttctactaagtgtagatttttttnnnnnnnnnnaagcttggcgtggatccgatatcaactagatcttgagacaaatggcagtattcatccacaattttaaaagaaaaggggggattggggggtacagtgcaggggaaagaatagtagacataatagcaacagacatacaaactaaag

SEQ ID NO: 19064 - DNA, 301 bp, Artificial Sequence
  Pten.3_NTC.50
  crRNA array
  misc_feature (148)..(157): n is a, c, g, or t
cttggctttatatatcttgtggaaaggacgaaacaccgtaatttctactaagtgtagatggagtcaagaggctgatttttaatttctactaagtgtagatattgccgctcgcgcaaaatctaatttctactaagtgtagatttttttnnnnnnnnnnaagcttggcgtggatccgatatcaactagatcttgagacaaatggcagtattcatccacaattttaaaagaaaaggggggattggggggtacagtgcaggggaaagaatagtagacataatagcaacagacatacaaactaaag

SEQ ID NO: 19065 - DNA, 301 bp, Artificial Sequence
  Pten.3_NTC.51
  crRNA array
  misc_feature (148)..(157): n is a, c, g, or t
cttggctttatatatcttgtggaaaggacgaaacaccgtaatttctactaagtgtagatggagtcaagaggctgatttttaatttctactaagtgtagattaacgcgcaacacgccaatgtaatttctactaagtgtagatttttttnnnnnnnnnnaagcttggcgtggatccgatatcaactagatcttgagacaaatggcagtattcatccacaattttaaaagaaaaggggggattggggggtacagtgcaggggaaagaatagtagacataatagcaacagacatacaaactaaag

SEQ ID NO: 19066 - DNA, 301 bp, Artificial Sequence
  Pten.3_NTC.6
  crRNA array
  misc_feature (148)..(157): n is a, c, g, or t
cttggctttatatatcttgtggaaaggacgaaacaccgtaatttctactaagtgtagatggagtcaagaggctgatttttaatttctactaagtgtagatcgaatcgcgcctacgggaattaatttctactaagtgtagatttttttnnnnnnnnnnaagcttggcgtggatccgatatcaactagatcttgagacaaatggcagtattcatccacaattttaaaagaaaaggggggattggggggtacagtgcaggggaaagaatagtagacataatagcaacagacatacaaactaaag

SEQ ID NO: 19067 - DNA, 301 bp, Artificial Sequence
  Pten.3_NTC.7
  crRNA array
  misc_feature (148)..(157): n is a, c, g, or t
cttggctttatatatcttgtggaaaggacgaaacaccgtaatttctactaagtgtagatggagtcaagaggctgatttttaatttctactaagtgtagatcgccgaacggataagactattaatttctactaagtgtagatttttttnnnnnnnnnnaagcttggcgtggatccgatatcaactagatcttgagacaaatggcagtattcatccacaattttaaaagaaaaggggggattggggggtacagtgcaggggaaagaatagtagacataatagcaacagacatacaaactaaag

SEQ ID NO: 19068 - DNA, 301 bp, Artificial Sequence
  Pten.3_NTC.8
  crRNA array
  misc_feature (148)..(157): n is a, c, g, or t
cttggctttatatatcttgtggaaaggacgaaacaccgtaatttctactaagtgtagatggagtcaagaggctgatttttaatttctactaagtgtagatcgaccgaggttacgctgggataatttctactaagtgtagatttttttnnnnnnnnnnaagcttggcgtggatccgatatcaactagatcttgagacaaatggcagtattcatccacaattttaaaagaaaaggggggattggggggtacagtgcaggggaaagaatagtagacataatagcaacagacatacaaactaaag

SEQ ID NO: 19069 - DNA, 301 bp, Artificial Sequence
  Pten.3_NTC.9
  crRNA array
  misc_feature (148)..(157): n is a, c, g, or t
cttggctttatatatcttgtggaaaggacgaaacaccgtaatttctactaagtgtagatggagtcaagaggctgatttttaatttctactaagtgtagatatcgccgtacggctatggcataatttctactaagtgtagatttttttnnnnnnnnnnaagcttggcgtggatccgatatcaactagatcttgagacaaatggcagtattcatccacaattttaaaagaaaaggggggattggggggtacagtgcaggggaaagaatagtagacataatagcaacagacatacaaactaaag

SEQ ID NO: 19070 - DNA, 301 bp, Artificial Sequence
  Pten.4_NTC.0
  crRNA array
  misc_feature (148)..(157): n is a, c, g, or t
cttggctttatatatcttgtggaaaggacgaaacaccgtaatttctactaagtgtagatctgtaagctaaaccactacataatttctactaagtgtagattatagcgtcgcgcgctaatttaatttctactaagtgtagatttttttnnnnnnnnnnaagcttggcgtggatccgatatcaactagatcttgagacaaatggcagtattcatccacaattttaaaagaaaaggggggattggggggtacagtgcaggggaaagaatagtagacataatagcaacagacatacaaactaaag

SEQ ID NO: 19071 - DNA, 301 bp, Artificial Sequence
  Pten.4_NTC.1
  crRNA array
  misc_feature (148)..(157): n is a, c, g, or t
cttggctttatatatcttgtggaaaggacgaaacaccgtaatttctactaagtgtagatctgtaagctaaaccactacataatttctactaagtgtagatcgcgtaaccgttccggctcctaatttctactaagtgtagatttttttnnnnnnnnnnaagcttggcgtggatccgatatcaactagatcttgagacaaatggcagtattcatccacaattttaaaagaaaaggggggattggggggtacagtgcaggggaaagaatagtagacataatagcaacagacatacaaactaaag

SEQ ID NO: 19072 - DNA, 301 bp, Artificial Sequence
  Pten.4_NTC.10
  crRNA array
  misc_feature (148)..(157): n is a, c, g, or t
cttggctttatatatcttgtggaaaggacgaaacaccgtaatttctactaagtgtagatctgtaagctaaaccactacataatttctactaagtgtagatcgctaagttcgcgcgggccgtaatttctactaagtgtagatttttttnnnnnnnnnnaagcttggcgtggatccgatatcaactagatcttgagacaaatggcagtattcatccacaattttaaaagaaaaggggggattggggggtacagtgcaggggaaagaatagtagacataatagcaacagacatacaaactaaag

SEQ ID NO: 19073 - DNA, 301 bp, Artificial Sequence
  Pten.4_NTC.11
  crRNA array
  misc_feature (148)..(157): n is a, c, g, or t
cttggctttatatatcttgtggaaaggacgaaacaccgtaatttctactaagtgtagatctgtaagctaaaccactacataatttctactaagtgtagatcgttcgtcgacgaagcaatctaatttctactaagtgtagatttttttnnnnnnnnnnaagcttggcgtggatccgatatcaactagatcttgagacaaatggcagtattcatccacaattttaaaagaaaaggggggattggggggtacagtgcaggggaaagaatagtagacataatagcaacagacatacaaactaaag

SEQ ID NO: 19074 - DNA, 301 bp, Artificial Sequence
  Pten.4_NTC.12
  crRNA array
  misc_feature (148)..(157): n is a, c, g, or t
cttggctttatatatcttgtggaaaggacgaaacaccgtaatttctactaagtgtagatctgtaagctaaaccactacataatttctactaagtgtagatcgccgacgattaatcaatagtaatttctactaagtgtagatttttttnnnnnnnnnnaagcttggcgtggatccgatatcaactagatcttgagacaaatggcagtattcatccacaattttaaaagaaaaggggggattggggggtacagtgcaggggaaagaatagtagacataatagcaacagacatacaaactaaag

SEQ ID NO: 19075 - DNA, 301 bp, Artificial Sequence
  Pten.4_NTC.13
  crRNA array
  misc_feature (148)..(157): n is a, c, g, or t
cttggctttatatatcttgtggaaaggacgaaacaccgtaatttctactaagtgtagatctgtaagctaaaccactacataatttctactaagtgtagatgaccgttgtatcgcgatcaataatttctactaagtgtagatttttttnnnnnnnnnnaagcttggcgtggatccgatatcaactagatcttgagacaaatggcagtattcatccacaattttaaaagaaaaggggggattggggggtacagtgcaggggaaagaatagtagacataatagcaacagacatacaaactaaag

SEQ ID NO: 19076 - DNA, 301 bp, Artificial Sequence
  Pten.4_NTC.14
  crRNA array
  misc_feature (148)..(157): n is a, c, g, or t
cttggctttatatatcttgtggaaaggacgaaacaccgtaatttctactaagtgtagatctgtaagctaaaccactacataatttctactaagtgtagatccgttcgtgcgatagtgttttaatttctactaagtgtagatttttttnnnnnnnnnnaagcttggcgtggatccgatatcaactagatcttgagacaaatggcagtattcatccacaattttaaaagaaaaggggggattggggggtacagtgcaggggaaagaatagtagacataatagcaacagacatacaaactaaag

SEQ ID NO: 19077 - DNA, 301 bp, Artificial Sequence
  Pten.4_NTC.15
  crRNA array
  misc_feature (148)..(157): n is a, c, g, or t
cttggctttatatatcttgtggaaaggacgaaacaccgtaatttctactaagtgtagatctgtaagctaaaccactacataatttctactaagtgtagatgttgtcgtgccgcgaatttataatttctactaagtgtagatttttttnnnnnnnnnnaagcttggcgtggatccgatatcaactagatcttgagacaaatggcagtattcatccacaattttaaaagaaaaggggggattggggggtacagtgcaggggaaagaatagtagacataatagcaacagacatacaaactaaag

SEQ ID NO: 19078 - DNA, 301 bp, Artificial Sequence
  Pten.4_NTC.16
  crRNA array
  misc_feature (148)..(157): n is a, c, g, or t
cttggctttatatatcttgtggaaaggacgaaacaccgtaatttctactaagtgtagatctgtaagctaaaccactacataatttctactaagtgtagatcggtacgttagacgaaaatttaatttctactaagtgtagatttttttnnnnnnnnnnaagcttggcgtggatccgatatcaactagatcttgagacaaatggcagtattcatccacaattttaaaagaaaaggggggattggggggtacagtgcaggggaaagaatagtagacataatagcaacagacatacaaactaaag

SEQ ID NO: 19079 - DNA, 301 bp, Artificial Sequence
  Pten.4_NTC.17
  crRNA array
  misc_feature (148)..(157): n is a, c, g, or t
cttggctttatatatcttgtggaaaggacgaaacaccgtaatttctactaagtgtagatctgtaagctaaaccactacataatttctactaagtgtagattatcgaacgctatcgaacgttaatttctactaagtgtagatttttttnnnnnnnnnnaagcttggcgtggatccgatatcaactagatcttgagacaaatggcagtattcatccacaattttaaaagaaaaggggggattggggggtacagtgcaggggaaagaatagtagacataatagcaacagacatacaaactaaag

SEQ ID NO: 19080 - DNA, 301 bp, Artificial Sequence
  Pten.4_NTC.18
  crRNA array
  misc_feature (148)..(157): n is a, c, g, or t
cttggctttatatatcttgtggaaaggacgaaacaccgtaatttctactaagtgtagatctgtaagctaaaccactacataatttctactaagtgtagattccggttacgaccggcaaaataatttctactaagtgtagatttttttnnnnnnnnnnaagcttggcgtggatccgatatcaactagatcttgagacaaatggcagtattcatccacaattttaaaagaaaaggggggattggggggtacagtgcaggggaaagaatagtagacataatagcaacagacatacaaactaaag

SEQ ID NO: 19081 - DNA, 301 bp, Artificial Sequence
  Pten.4_NTC.19
  crRNA array
  misc_feature (148)..(157): n is a, c, g, or t
cttggctttatatatcttgtggaaaggacgaaacaccgtaatttctactaagtgtagatctgtaagctaaaccactacataatttctactaagtgtagatcgtcgtagaacgatacccgataatttctactaagtgtagatttttttnnnnnnnnnnaagcttggcgtggatccgatatcaactagatcttgagacaaatggcagtattcatccacaattttaaaagaaaaggggggattggggggtacagtgcaggggaaagaatagtagacataatagcaacagacatacaaactaaag

SEQ ID NO: 19082 - DNA, 301 bp, Artificial Sequence
  Pten.4_NTC.2
  crRNA array
  misc_feature (148)..(157): n is a, c, g, or t
cttggctttatatatcttgtggaaaggacgaaacaccgtaatttctactaagtgtagatctgtaagctaaaccactacataatttctactaagtgtagatttatgtcgcgccgcgacccgtaatttctactaagtgtagatttttttnnnnnnnnnnaagcttggcgtggatccgatatcaactagatcttgagacaaatggcagtattcatccacaattttaaaagaaaaggggggattggggggtacagtgcaggggaaagaatagtagacataatagcaacagacatacaaactaaag

SEQ ID NO: 19083 - DNA, 301 bp, Artificial Sequence
  Pten.4_NTC.20
  crRNA array
  misc_feature (148)..(157): n is a, c, g, or t
cttggctttatatatcttgtggaaaggacgaaacaccgtaatttctactaagtgtagatctgtaagctaaaccactacataatttctactaagtgtagatattccggcgcgaccagaagataatttctactaagtgtagatttttttnnnnnnnnnnaagcttggcgtggatccgatatcaactagatcttgagacaaatggcagtattcatccacaattttaaaagaaaaggggggattggggggtacagtgcaggggaaagaatagtagacataatagcaacagacatacaaactaaag

SEQ ID NO: 19084 - DNA, 301 bp, Artificial Sequence
  Pten.4_NTC.21
  crRNA array
  misc_feature (148)..(157): n is a, c, g, or t
cttggctttatatatcttgtggaaaggacgaaacaccgtaatttctactaagtgtagatctgtaagctaaaccactacataatttctactaagtgtagatgtataacttcgcgcggtccgtaatttctactaagtgtagatttttttnnnnnnnnnnaagcttggcgtggatccgatatcaactagatcttgagacaaatggcagtattcatccacaattttaaaagaaaaggggggattggggggtacagtgcaggggaaagaatagtagacataatagcaacagacatacaaactaaag

SEQ ID NO: 19085 - DNA, 301 bp, Artificial Sequence
  Pten.4_NTC.22
  crRNA array
  misc_feature (148)..(157): n is a, c, g, or t
cttggctttatatatcttgtggaaaggacgaaacaccgtaatttctactaagtgtagatctgtaagctaaaccactacataatttctactaagtgtagatgcgcgtcaacgtaatgtgcctaatttctactaagtgtagatttttttnnnnnnnnnnaagcttggcgtggatccgatatcaactagatcttgagacaaatggcagtattcatccacaattttaaaagaaaaggggggattggggggtacagtgcaggggaaagaatagtagacataatagcaacagacatacaaactaaag

SEQ ID NO: 19086 - DNA, 301 bp, Artificial Sequence
  Pten.4_NTC.23
  crRNA array
  misc_feature (148)..(157): n is a, c, g, or t
cttggctttatatatcttgtggaaaggacgaaacaccgtaatttctactaagtgtagatctgtaagctaaaccactacataatttctactaagtgtagatacgcgctattatcgtaggtgtaatttctactaagtgtagatttttttnnnnnnnnnnaagcttggcgtggatccgatatcaactagatcttgagacaaatggcagtattcatccacaattttaaaagaaaaggggggattggggggtacagtgcaggggaaagaatagtagacataatagcaacagacatacaaactaaag

SEQ ID NO: 19087 - DNA, 301 bp, Artificial Sequence
  Pten.4_NTC.24
  crRNA array
  misc_feature (148)..(157): n is a, c, g, or t
cttggctttatatatcttgtggaaaggacgaaacaccgtaatttctactaagtgtagatctgtaagctaaaccactacataatttctactaagtgtagatactatcgacgttcgtcccggtaatttctactaagtgtagatttttttnnnnnnnnnnaagcttggcgtggatccgatatcaactagatcttgagacaaatggcagtattcatccacaattttaaaagaaaaggggggattggggggtacagtgcaggggaaagaatagtagacataatagcaacagacatacaaactaaag

SEQ ID NO: 19088 - DNA, 301 bp, Artificial Sequence
  Pten.4_NTC.25
  crRNA array
  misc_feature (148)..(157): n is a, c, g, or t
cttggctttatatatcttgtggaaaggacgaaacaccgtaatttctactaagtgtagatctgtaagctaaaccactacataatttctactaagtgtagattcgcgttatcgtgccgtgcgtaatttctactaagtgtagatttttttnnnnnnnnnnaagcttggcgtggatccgatatcaactagatcttgagacaaatggcagtattcatccacaattttaaaagaaaaggggggattggggggtacagtgcaggggaaagaatagtagacataatagcaacagacatacaaactaaag

SEQ ID NO: 19089 - DNA, 301 bp, Artificial Sequence
  Pten.4_NTC.26
  crRNA array
  misc_feature (148)..(157): n is a, c, g, or t
cttggctttatatatcttgtggaaaggacgaaacaccgtaatttctactaagtgtagatctgtaagctaaaccactacataatttctactaagtgtagatcgcgacggcggttttaacactaatttctactaagtgtagatttttttnnnnnnnnnnaagcttggcgtggatccgatatcaactagatcttgagacaaatggcagtattcatccacaattttaaaagaaaaggggggattggggggtacagtgcaggggaaagaatagtagacataatagcaacagacatacaaactaaag

SEQ ID NO: 19090 - DNA, 301 bp, Artificial Sequence
  Pten.4_NTC.27
  crRNA array
  misc_feature (148)..(157): n is a, c, g, or t
cttggctttatatatcttgtggaaaggacgaaacaccgtaatttctactaagtgtagatctgtaagctaaaccactacataatttctactaagtgtagatgtcgcgttgcgaccggcgcttaatttctactaagtgtagatttttttnnnnnnnnnnaagcttggcgtggatccgatatcaactagatcttgagacaaatggcagtattcatccacaattttaaaagaaaaggggggattggggggtacagtgcaggggaaagaatagtagacataatagcaacagacatacaaactaaag

SEQ ID NO: 19091 - DNA, 301 bp, Artificial Sequence
  Pten.4_NTC.28
  crRNA array
  misc_feature (148)..(157): n is a, c, g, or t
cttggctttatatatcttgtggaaaggacgaaacaccgtaatttctactaagtgtagatctgtaagctaaaccactacataatttctactaagtgtagataccgctaatcggcgtaaacttaatttctactaagtgtagatttttttnnnnnnnnnnaagcttggcgtggatccgatatcaactagatcttgagacaaatggcagtattcatccacaattttaaaagaaaaggggggattggggggtacagtgcaggggaaagaatagtagacataatagcaacagacatacaaactaaag

SEQ ID NO: 19092 - DNA, 301 bp, Artificial Sequence
  Pten.4_NTC.29
  crRNA array
  misc_feature (148)..(157): n is a, c, g, or t
cttggctttatatatcttgtggaaaggacgaaacaccgtaatttctactaagtgtagatctgtaagctaaaccactacataatttctactaagtgtagatcgcgatctataccgtctatataatttctactaagtgtagatttttttnnnnnnnnnnaagcttggcgtggatccgatatcaactagatcttgagacaaatggcagtattcatccacaattttaaaagaaaaggggggattggggggtacagtgcaggggaaagaatagtagacataatagcaacagacatacaaactaaag

SEQ ID NO: 19093 - DNA, 301 bp, Artificial Sequence
  Pten.4_NTC.3
  crRNA array
  misc_feature (148)..(157): n is a, c, g, or t
cttggctttatatatcttgtggaaaggacgaaacaccgtaatttctactaagtgtagatctgtaagctaaaccactacataatttctactaagtgtagattcgacgcgagacgacgtacataatttctactaagtgtagatttttttnnnnnnnnnnaagcttggcgtggatccgatatcaactagatcttgagacaaatggcagtattcatccacaattttaaaagaaaaggggggattggggggtacagtgcaggggaaagaatagtagacataatagcaacagacatacaaactaaag

SEQ ID NO: 19094 - DNA, 301 bp, Artificial Sequence
  Pten.4_NTC.30
  crRNA array
  misc_feature (148)..(157): n is a, c, g, or t
cttggctttatatatcttgtggaaaggacgaaacaccgtaatttctactaagtgtagatctgtaagctaaaccactacataatttctactaagtgtagatcgatcgtacgggtgtcctaataatttctactaagtgtagatttttttnnnnnnnnnnaagcttggcgtggatccgatatcaactagatcttgagacaaatggcagtattcatccacaattttaaaagaaaaggggggattggggggtacagtgcaggggaaagaatagtagacataatagcaacagacatacaaactaaag

SEQ ID NO: 19095 - DNA, 301 bp, Artificial Sequence
  Pten.4_NTC.31
  crRNA array
  misc_feature (148)..(157): n is a, c, g, or t
cttggctttatatatcttgtggaaaggacgaaacaccgtaatttctactaagtgtagatctgtaagctaaaccactacataatttctactaagtgtagatgccgaccgcgtgattgtaggtaatttctactaagtgtagatttttttnnnnnnnnnnaagcttggcgtggatccgatatcaactagatcttgagacaaatggcagtattcatccacaattttaaaagaaaaggggggattggggggtacagtgcaggggaaagaatagtagacataatagcaacagacatacaaactaaag

SEQ ID NO: 19096 - DNA, 301 bp, Artificial Sequence
  Pten.4_NTC.32
  crRNA array
  misc_feature (148)..(157): n is a, c, g, or t
cttggctttatatatcttgtggaaaggacgaaacaccgtaatttctactaagtgtagatctgtaagctaaaccactacataatttctactaagtgtagatgcacgttacgcccgggtcactaatttctactaagtgtagatttttttnnnnnnnnnnaagcttggcgtggatccgatatcaactagatcttgagacaaatggcagtattcatccacaattttaaaagaaaaggggggattggggggtacagtgcaggggaaagaatagtagacataatagcaacagacatacaaactaaag

SEQ ID NO: 19097 - DNA, 301 bp, Artificial Sequence
  Pten.4_NTC.33
  crRNA array
  misc_feature (148)..(157): n is a, c, g, or t
cttggctttatatatcttgtggaaaggacgaaacaccgtaatttctactaagtgtagatctgtaagctaaaccactacataatttctactaagtgtagattaagcgaccgacgcattcgctaatttctactaagtgtagatttttttnnnnnnnnnnaagcttggcgtggatccgatatcaactagatcttgagacaaatggcagtattcatccacaattttaaaagaaaaggggggattggggggtacagtgcaggggaaagaatagtagacataatagcaacagacatacaaactaaag

SEQ ID NO: 19098 - DNA, 301 bp, Artificial Sequence
  Pten.4_NTC.34
  crRNA array
  misc_feature (148)..(157): n is a, c, g, or t
cttggctttatatatcttgtggaaaggacgaaacaccgtaatttctactaagtgtagatctgtaagctaaaccactacataatttctactaagtgtagattagcgttcgacacgtgaaactaatttctactaagtgtagatttttttnnnnnnnnnnaagcttggcgtggatccgatatcaactagatcttgagacaaatggcagtattcatccacaattttaaaagaaaaggggggattggggggtacagtgcaggggaaagaatagtagacataatagcaacagacatacaaactaaag

SEQ ID NO: 19099 - DNA, 301 bp, Artificial Sequence
  Pten.4_NTC.35
  crRNA array
  misc_feature (148)..(157): n is a, c, g, or t
cttggctttatatatcttgtggaaaggacgaaacaccgtaatttctactaagtgtagatctgtaagctaaaccactacataatttctactaagtgtagattggcgcgtaatcgctattcgtaatttctactaagtgtagatttttttnnnnnnnnnnaagcttggcgtggatccgatatcaactagatcttgagacaaatggcagtattcatccacaattttaaaagaaaaggggggattggggggtacagtgcaggggaaagaatagtagacataatagcaacagacatacaaactaaag

SEQ ID NO: 19100 - DNA, 301 bp, Artificial Sequence
  Pten.4_NTC.36
  crRNA array
  misc_feature (148)..(157): n is a, c, g, or t
cttggctttatatatcttgtggaaaggacgaaacaccgtaatttctactaagtgtagatctgtaagctaaaccactacataatttctactaagtgtagatcaacccgccgtagcgggccttaatttctactaagtgtagatttttttnnnnnnnnnnaagcttggcgtggatccgatatcaactagatcttgagacaaatggcagtattcatccacaattttaaaagaaaaggggggattggggggtacagtgcaggggaaagaatagtagacataatagcaacagacatacaaactaaag

SEQ ID NO: 19101 - DNA, 301 bp, Artificial Sequence
  Pten.4_NTC.37
  crRNA array
  misc_feature (148)..(157): n is a, c, g, or t
cttggctttatatatcttgtggaaaggacgaaacaccgtaatttctactaagtgtagatctgtaagctaaaccactacataatttctactaagtgtagattttgcgttgacgcgattacttaatttctactaagtgtagatttttttnnnnnnnnnnaagcttggcgtggatccgatatcaactagatcttgagacaaatggcagtattcatccacaattttaaaagaaaaggggggattggggggtacagtgcaggggaaagaatagtagacataatagcaacagacatacaaactaaag

SEQ ID NO: 19102 - DNA, 301 bp, Artificial Sequence
  Pten.4_NTC.38
  crRNA array
  misc_feature (148)..(157): n is a, c, g, or t
cttggctttatatatcttgtggaaaggacgaaacaccgtaatttctactaagtgtagatctgtaagctaaaccactacataatttctactaagtgtagataacggagcgcgatactaccataatttctactaagtgtagatttttttnnnnnnnnnnaagcttggcgtggatccgatatcaactagatcttgagacaaatggcagtattcatccacaattttaaaagaaaaggggggattggggggtacagtgcaggggaaagaatagtagacataatagcaacagacatacaaactaaag

SEQ ID NO: 19103 - DNA, 301 bp, Artificial Sequence
  Pten.4_NTC.39
  crRNA array
  misc_feature (148)..(157): n is a, c, g, or t
cttggctttatatatcttgtggaaaggacgaaacaccgtaatttctactaagtgtagatctgtaagctaaaccactacataatttctactaagtgtagatccggacgttataacgtttcttaatttctactaagtgtagatttttttnnnnnnnnnnaagcttggcgtggatccgatatcaactagatcttgagacaaatggcagtattcatccacaattttaaaagaaaaggggggattggggggtacagtgcaggggaaagaatagtagacataatagcaacagacatacaaactaaag

SEQ ID NO: 19104 - DNA, 301 bp, Artificial Sequence
  Pten.4_NTC.4
  crRNA array
  misc_feature (148)..(157): n is a, c, g, or t
cttggctttatatatcttgtggaaaggacgaaacaccgtaatttctactaagtgtagatctgtaagctaaaccactacataatttctactaagtgtagatatacccgtcgcgaacgtgagtaatttctactaagtgtagatttttttnnnnnnnnnnaagcttggcgtggatccgatatcaactagatcttgagacaaatggcagtattcatccacaattttaaaagaaaaggggggattggggggtacagtgcaggggaaagaatagtagacataatagcaacagacatacaaactaaag

SEQ ID NO: 19105 - DNA, 301 bp, Artificial Sequence
  Pten.4_NTC.40
  crRNA array
  misc_feature (148)..(157): n is a, c, g, or t
cttggctttatatatcttgtggaaaggacgaaacaccgtaatttctactaagtgtagatctgtaagctaaaccactacataatttctactaagtgtagatattcgcgaacccggccggaataatttctactaagtgtagatttttttnnnnnnnnnnaagcttggcgtggatccgatatcaactagatcttgagacaaatggcagtattcatccacaattttaaaagaaaaggggggattggggggtacagtgcaggggaaagaatagtagacataatagcaacagacatacaaactaaag

SEQ ID NO: 19106 - DNA, 301 bp, Artificial Sequence
  Pten.4_NTC.41
  crRNA array
  misc_feature (148)..(157): n is a, c, g, or t
cttggctttatatatcttgtggaaaggacgaaacaccgtaatttctactaagtgtagatctgtaagctaaaccactacataatttctactaagtgtagatttgatggcgcgacgcgttattaatttctactaagtgtagatttttttnnnnnnnnnnaagcttggcgtggatccgatatcaactagatcttgagacaaatggcagtattcatccacaattttaaaagaaaaggggggattggggggtacagtgcaggggaaagaatagtagacataatagcaacagacatacaaactaaag

SEQ ID NO: 19107 - DNA, 301 bp, Artificial Sequence
  Pten.4_NTC.42
  crRNA array
  misc_feature (148)..(157): n is a, c, g, or t
cttggctttatatatcttgtggaaaggacgaaacaccgtaatttctactaagtgtagatctgtaagctaaaccactacataatttctactaagtgtagatggtcaaatcgcggcgataactaatttctactaagtgtagatttttttnnnnnnnnnnaagcttggcgtggatccgatatcaactagatcttgagacaaatggcagtattcatccacaattttaaaagaaaaggggggattggggggtacagtgcaggggaaagaatagtagacataatagcaacagacatacaaactaaag

SEQ ID NO: 19108 - DNA, 301 bp, Artificial Sequence
  Pten.4_NTC.43
  crRNA array
  misc_feature (148)..(157): n is a, c, g, or t
cttggctttatatatcttgtggaaaggacgaaacaccgtaatttctactaagtgtagatctgtaagctaaaccactacataatttctactaagtgtagatcgactcgcgcattgaactggtaatttctactaagtgtagatttttttnnnnnnnnnnaagcttggcgtggatccgatatcaactagatcttgagacaaatggcagtattcatccacaattttaaaagaaaaggggggattggggggtacagtgcaggggaaagaatagtagacataatagcaacagacatacaaactaaag

SEQ ID NO: 19109 - DNA, 301 bp, Artificial Sequence
  Pten.4_NTC.44
  crRNA array
  misc_feature (148)..(157): n is a, c, g, or t
cttggctttatatatcttgtggaaaggacgaaacaccgtaatttctactaagtgtagatctgtaagctaaaccactacataatttctactaagtgtagatagcgtcgtacgatttatcgttaatttctactaagtgtagatttttttnnnnnnnnnnaagcttggcgtggatccgatatcaactagatcttgagacaaatggcagtattcatccacaattttaaaagaaaaggggggattggggggtacagtgcaggggaaagaatagtagacataatagcaacagacatacaaactaaag

SEQ ID NO: 19110 - DNA, 301 bp, Artificial Sequence
  Pten.4_NTC.45
  crRNA array
  misc_feature (148)..(157): n is a, c, g, or t
cttggctttatatatcttgtggaaaggacgaaacaccgtaatttctactaagtgtagatctgtaagctaaaccactacataatttctactaagtgtagatcggaacgcgtgatactagggtaatttctactaagtgtagatttttttnnnnnnnnnnaagcttggcgtggatccgatatcaactagatcttgagacaaatggcagtattcatccacaattttaaaagaaaaggggggattggggggtacagtgcaggggaaagaatagtagacataatagcaacagacatacaaactaaag

SEQ ID NO: 19111 - DNA, 301 bp, Artificial Sequence
  Pten.4_NTC.46
  crRNA array
  misc_feature (148)..(157): n is a, c, g, or t
cttggctttatatatcttgtggaaaggacgaaacaccgtaatttctactaagtgtagatctgtaagctaaaccactacataatttctactaagtgtagatagcgggtcgtagacgcgcggtaatttctactaagtgtagatttttttnnnnnnnnnnaagcttggcgtggatccgatatcaactagatcttgagacaaatggcagtattcatccacaattttaaaagaaaaggggggattggggggtacagtgcaggggaaagaatagtagacataatagcaacagacatacaaactaaag

SEQ ID NO: 19112 - DNA, 301 bp, Artificial Sequence
  Pten.4_NTC.47
  crRNA array
  misc_feature (148)..(157): n is a, c, g, or t
cttggctttatatatcttgtggaaaggacgaaacaccgtaatttctactaagtgtagatctgtaagctaaaccactacataatttctactaagtgtagattctcgtatcgcgattgttaataatttctactaagtgtagatttttttnnnnnnnnnnaagcttggcgtggatccgatatcaactagatcttgagacaaatggcagtattcatccacaattttaaaagaaaaggggggattggggggtacagtgcaggggaaagaatagtagacataatagcaacagacatacaaactaaag

SEQ ID NO: 19113 - DNA, 301 bp, Artificial Sequence
  Pten.4_NTC.48
  crRNA array
  misc_feature (148)..(157): n is a, c, g, or t
cttggctttatatatcttgtggaaaggacgaaacaccgtaatttctactaagtgtagatctgtaagctaaaccactacataatttctactaagtgtagatcggtcgactacggctgttagtaatttctactaagtgtagatttttttnnnnnnnnnnaagcttggcgtggatccgatatcaactagatcttgagacaaatggcagtattcatccacaattttaaaagaaaaggggggattggggggtacagtgcaggggaaagaatagtagacataatagcaacagacatacaaactaaag

SEQ ID NO: 19114 - DNA, 301 bp, Artificial Sequence
  Pten.4_NTC.49
  crRNA array
  misc_feature (148)..(157): n is a, c, g, or t
cttggctttatatatcttgtggaaaggacgaaacaccgtaatttctactaagtgtagatctgtaagctaaaccactacataatttctactaagtgtagattcggggcgcgtcaactgaattaatttctactaagtgtagatttttttnnnnnnnnnnaagcttggcgtggatccgatatcaactagatcttgagacaaatggcagtattcatccacaattttaaaagaaaaggggggattggggggtacagtgcaggggaaagaatagtagacataatagcaacagacatacaaactaaag

SEQ ID NO: 19115 - DNA, 301 bp, Artificial Sequence
  Pten.4_NTC.5
  crRNA array
  misc_feature (148)..(157): n is a, c, g, or t
cttggctttatatatcttgtggaaaggacgaaacaccgtaatttctactaagtgtagatctgtaagctaaaccactacataatttctactaagtgtagatgcttacgcgtcgcgaatgtataatttctactaagtgtagatttttttnnnnnnnnnnaagcttggcgtggatccgatatcaactagatcttgagacaaatggcagtattcatccacaattttaaaagaaaaggggggattggggggtacagtgcaggggaaagaatagtagacataatagcaacagacatacaaactaaag

SEQ ID NO: 19116 - DNA, 301 bp, Artificial Sequence
  Pten.4_NTC.50
  crRNA array
  misc_feature (148)..(157): n is a, c, g, or t
cttggctttatatatcttgtggaaaggacgaaacaccgtaatttctactaagtgtagatctgtaagctaaaccactacataatttctactaagtgtagatattgccgctcgcgcaaaatctaatttctactaagtgtagatttttttnnnnnnnnnnaagcttggcgtggatccgatatcaactagatcttgagacaaatggcagtattcatccacaattttaaaagaaaaggggggattggggggtacagtgcaggggaaagaatagtagacataatagcaacagacatacaaactaaag

SEQ ID NO: 19117 - DNA, 301 bp, Artificial Sequence
  Pten.4_NTC.51
  crRNA array
  misc_feature (148)..(157): n is a, c, g, or t
cttggctttatatatcttgtggaaaggacgaaacaccgtaatttctactaagtgtagatctgtaagctaaaccactacataatttctactaagtgtagattaacgcgcaacacgccaatgtaatttctactaagtgtagatttttttnnnnnnnnnnaagcttggcgtggatccgatatcaactagatcttgagacaaatggcagtattcatccacaattttaaaagaaaaggggggattggggggtacagtgcaggggaaagaatagtagacataatagcaacagacatacaaactaaag

SEQ ID NO: 19118 - DNA, 301 bp, Artificial Sequence
  Pten.4_NTC.6
  crRNA array
  misc_feature (148)..(157): n is a, c, g, or t
cttggctttatatatcttgtggaaaggacgaaacaccgtaatttctactaagtgtagatctgtaagctaaaccactacataatttctactaagtgtagatcgaatcgcgcctacgggaattaatttctactaagtgtagatttttttnnnnnnnnnnaagcttggcgtggatccgatatcaactagatcttgagacaaatggcagtattcatccacaattttaaaagaaaaggggggattggggggtacagtgcaggggaaagaatagtagacataatagcaacagacatacaaactaaag

SEQ ID NO: 19119 - DNA, 301 bp, Artificial Sequence
  Pten.4_NTC.7
  crRNA array
  misc_feature (148)..(157): n is a, c, g, or t
cttggctttatatatcttgtggaaaggacgaaacaccgtaatttctactaagtgtagatctgtaagctaaaccactacataatttctactaagtgtagatcgccgaacggataagactattaatttctactaagtgtagatttttttnnnnnnnnnnaagcttggcgtggatccgatatcaactagatcttgagacaaatggcagtattcatccacaattttaaaagaaaaggggggattggggggtacagtgcaggggaaagaatagtagacataatagcaacagacatacaaactaaag

SEQ ID NO: 19120 - DNA, 301 bp, Artificial Sequence
  Pten.4_NTC.8
  crRNA array
  misc_feature (148)..(157): n is a, c, g, or t
cttggctttatatatcttgtggaaaggacgaaacaccgtaatttctactaagtgtagatctgtaagctaaaccactacataatttctactaagtgtagatcgaccgaggttacgctgggataatttctactaagtgtagatttttttnnnnnnnnnnaagcttggcgtggatccgatatcaactagatcttgagacaaatggcagtattcatccacaattttaaaagaaaaggggggattggggggtacagtgcaggggaaagaatagtagacataatagcaacagacatacaaactaaag

SEQ ID NO: 19121 - DNA, 301 bp, Artificial Sequence
  Pten.4_NTC.9
  crRNA array
  misc_feature (148)..(157): n is a, c, g, or t
cttggctttatatatcttgtggaaaggacgaaacaccgtaatttctactaagtgtagatctgtaagctaaaccactacataatttctactaagtgtagatatcgccgtacggctatggcataatttctactaagtgtagatttttttnnnnnnnnnnaagcttggcgtggatccgatatcaactagatcttgagacaaatggcagtattcatccacaattttaaaagaaaaggggggattggggggtacagtgcaggggaaagaatagtagacataatagcaacagacatacaaactaaag

SEQ ID NO: 19122 - DNA, 301 bp, Artificial Sequence
  Rb1.1_NTC.0
  crRNA array
  misc_feature (148)..(157): n is a, c, g, or t
cttggctttatatatcttgtggaaaggacgaaacaccgtaatttctactaagtgtagattctgacatgatcgggtaccttaatttctactaagtgtagattatagcgtcgcgcgctaatttaatttctactaagtgtagatttttttnnnnnnnnnnaagcttggcgtggatccgatatcaactagatcttgagacaaatggcagtattcatccacaattttaaaagaaaaggggggattggggggtacagtgcaggggaaagaatagtagacataatagcaacagacatacaaactaaag

SEQ ID NO: 19123 - DNA, 301 bp, Artificial Sequence
  Rb1.1_NTC.1
  crRNA array
  misc_feature (148)..(157): n is a, c, g, or t
cttggctttatatatcttgtggaaaggacgaaacaccgtaatttctactaagtgtagattctgacatgatcgggtaccttaatttctactaagtgtagatcgcgtaaccgttccggctcctaatttctactaagtgtagatttttttnnnnnnnnnnaagcttggcgtggatccgatatcaactagatcttgagacaaatggcagtattcatccacaattttaaaagaaaaggggggattggggggtacagtgcaggggaaagaatagtagacataatagcaacagacatacaaactaaag

SEQ ID NO: 19124 - DNA, 301 bp, Artificial Sequence
  Rb1.1_NTC.10
  crRNA array
  misc_feature (148)..(157): n is a, c, g, or t
cttggctttatatatcttgtggaaaggacgaaacaccgtaatttctactaagtgtagattctgacatgatcgggtaccttaatttctactaagtgtagatcgctaagttcgcgcgggccgtaatttctactaagtgtagatttttttnnnnnnnnnnaagcttggcgtggatccgatatcaactagatcttgagacaaatggcagtattcatccacaattttaaaagaaaaggggggattggggggtacagtgcaggggaaagaatagtagacataatagcaacagacatacaaactaaag

SEQ ID NO: 19125 - DNA, 301 bp, Artificial Sequence
  Rb1.1_NTC.11
  crRNA array
  misc_feature (148)..(157): n is a, c, g, or t
cttggctttatatatcttgtggaaaggacgaaacaccgtaatttctactaagtgtagattctgacatgatcgggtaccttaatttctactaagtgtagatcgttcgtcgacgaagcaatctaatttctactaagtgtagatttttttnnnnnnnnnnaagcttggcgtggatccgatatcaactagatcttgagacaaatggcagtattcatccacaattttaaaagaaaaggggggattggggggtacagtgcaggggaaagaatagtagacataatagcaacagacatacaaactaaag

SEQ ID NO: 19126 - DNA, 301 bp, Artificial Sequence
  Rb1.1_NTC.12
  crRNA array
  misc_feature (148)..(157): n is a, c, g, or t
cttggctttatatatcttgtggaaaggacgaaacaccgtaatttctactaagtgtagattctgacatgatcgggtaccttaatttctactaagtgtagatcgccgacgattaatcaatagtaatttctactaagtgtagatttttttnnnnnnnnnnaagcttggcgtggatccgatatcaactagatcttgagacaaatggcagtattcatccacaattttaaaagaaaaggggggattggggggtacagtgcaggggaaagaatagtagacataatagcaacagacatacaaactaaag

SEQ ID NO: 19127 - DNA, 301 bp, Artificial Sequence
  Rb1.1_NTC.13
  crRNA array
  misc_feature (148)..(157): n is a, c, g, or t
cttggctttatatatcttgtggaaaggacgaaacaccgtaatttctactaagtgtagattctgacatgatcgggtaccttaatttctactaagtgtagatgaccgttgtatcgcgatcaataatttctactaagtgtagatttttttnnnnnnnnnnaagcttggcgtggatccgatatcaactagatcttgagacaaatggcagtattcatccacaattttaaaagaaaaggggggattggggggtacagtgcaggggaaagaatagtagacataatagcaacagacatacaaactaaag

SEQ ID NO: 19128 - DNA, 301 bp, Artificial Sequence
  Rb1.1_NTC.14
  crRNA array
  misc_feature (148)..(157): n is a, c, g, or t
cttggctttatatatcttgtggaaaggacgaaacaccgtaatttctactaagtgtagattctgacatgatcgggtaccttaatttctactaagtgtagatccgttcgtgcgatagtgttttaatttctactaagtgtagatttttttnnnnnnnnnnaagcttggcgtggatccgatatcaactagatcttgagacaaatggcagtattcatccacaattttaaaagaaaaggggggattggggggtacagtgcaggggaaagaatagtagacataatagcaacagacatacaaactaaag

SEQ ID NO: 19129 - DNA, 301 bp, Artificial Sequence
  Rb1.1_NTC.15
  crRNA array
  misc_feature (148)..(157): n is a, c, g, or t
cttggctttatatatcttgtggaaaggacgaaacaccgtaatttctactaagtgtagattctgacatgatcgggtaccttaatttctactaagtgtagatgttgtcgtgccgcgaatttataatttctactaagtgtagatttttttnnnnnnnnnnaagcttggcgtggatccgatatcaactagatcttgagacaaatggcagtattcatccacaattttaaaagaaaaggggggattggggggtacagtgcaggggaaagaatagtagacataatagcaacagacatacaaactaaag

SEQ ID NO: 19130 - DNA, 301 bp, Artificial Sequence
  Rb1.1_NTC.16
  crRNA array
  misc_feature (148)..(157): n is a, c, g, or t
cttggctttatatatcttgtggaaaggacgaaacaccgtaatttctactaagtgtagattctgacatgatcgggtaccttaatttctactaagtgtagatcggtacgttagacgaaaatttaatttctactaagtgtagatttttttnnnnnnnnnnaagcttggcgtggatccgatatcaactagatcttgagacaaatggcagtattcatccacaattttaaaagaaaaggggggattggggggtacagtgcaggggaaagaatagtagacataatagcaacagacatacaaactaaag

SEQ ID NO: 19131 - DNA, 301 bp, Artificial Sequence
  Rb1.1_NTC.17
  crRNA array
  misc_feature (148)..(157): n is a, c, g, or t
cttggctttatatatcttgtggaaaggacgaaacaccgtaatttctactaagtgtagattctgacatgatcgggtaccttaatttctactaagtgtagattatcgaacgctatcgaacgttaatttctactaagtgtagatttttttnnnnnnnnnnaagcttggcgtggatccgatatcaactagatcttgagacaaatggcagtattcatccacaattttaaaagaaaaggggggattggggggtacagtgcaggggaaagaatagtagacataatagcaacagacatacaaactaaag

SEQ ID NO: 19132 - DNA, 301 bp, Artificial Sequence
  Rb1.1_NTC.18
  crRNA array
  misc_feature (148)..(157): n is a, c, g, or t
cttggctttatatatcttgtggaaaggacgaaacaccgtaatttctactaagtgtagattctgacatgatcgggtaccttaatttctactaagtgtagattccggttacgaccggcaaaataatttctactaagtgtagatttttttnnnnnnnnnnaagcttggcgtggatccgatatcaactagatcttgagacaaatggcagtattcatccacaattttaaaagaaaaggggggattggggggtacagtgcaggggaaagaatagtagacataatagcaacagacatacaaactaaag

SEQ ID NO: 19133 - DNA, 301 bp, Artificial Sequence
  Rb1.1_NTC.19
  crRNA array
  misc_feature (148)..(157): n is a, c, g, or t
cttggctttatatatcttgtggaaaggacgaaacaccgtaatttctactaagtgtagattctgacatgatcgggtaccttaatttctactaagtgtagatcgtcgtagaacgatacccgataatttctactaagtgtagatttttttnnnnnnnnnnaagcttggcgtggatccgatatcaactagatcttgagacaaatggcagtattcatccacaattttaaaagaaaaggggggattggggggtacagtgcaggggaaagaatagtagacataatagcaacagacatacaaactaaag

SEQ ID NO: 19134 - DNA, 301 bp, Artificial Sequence
  Rb1.1_NTC.2
  crRNA array
  misc_feature (148)..(157): n is a, c, g, or t
cttggctttatatatcttgtggaaaggacgaaacaccgtaatttctactaagtgtagattctgacatgatcgggtaccttaatttctactaagtgtagatttatgtcgcgccgcgacccgtaatttctactaagtgtagatttttttnnnnnnnnnnaagcttggcgtggatccgatatcaactagatcttgagacaaatggcagtattcatccacaattttaaaagaaaaggggggattggggggtacagtgcaggggaaagaatagtagacataatagcaacagacatacaaactaaag

SEQ ID NO: 19135 - DNA, 301 bp, Artificial Sequence
  Rb1.1_NTC.20
  crRNA array
  misc_feature (148)..(157): n is a, c, g, or t
cttggctttatatatcttgtggaaaggacgaaacaccgtaatttctactaagtgtagattctgacatgatcgggtaccttaatttctactaagtgtagatattccggcgcgaccagaagataatttctactaagtgtagatttttttnnnnnnnnnnaagcttggcgtggatccgatatcaactagatcttgagacaaatggcagtattcatccacaattttaaaagaaaaggggggattggggggtacagtgcaggggaaagaatagtagacataatagcaacagacatacaaactaaag

SEQ ID NO: 19136 - DNA, 301 bp, Artificial Sequence
  Rb1.1_NTC.21
  crRNA array
  misc_feature (148)..(157): n is a, c, g, or t
cttggctttatatatcttgtggaaaggacgaaacaccgtaatttctactaagtgtagattctgacatgatcgggtaccttaatttctactaagtgtagatgtataacttcgcgcggtccgtaatttctactaagtgtagatttttttnnnnnnnnnnaagcttggcgtggatccgatatcaactagatcttgagacaaatggcagtattcatccacaattttaaaagaaaaggggggattggggggtacagtgcaggggaaagaatagtagacataatagcaacagacatacaaactaaag

SEQ ID NO: 19137 - DNA, 301 bp, Artificial Sequence
  Rb1.1_NTC.22
  crRNA array
  misc_feature (148)..(157): n is a, c, g, or t
cttggctttatatatcttgtggaaaggacgaaacaccgtaatttctactaagtgtagattctgacatgatcgggtaccttaatttctactaagtgtagatgcgcgtcaacgtaatgtgcctaatttctactaagtgtagatttttttnnnnnnnnnnaagcttggcgtggatccgatatcaactagatcttgagacaaatggcagtattcatccacaattttaaaagaaaaggggggattggggggtacagtgcaggggaaagaatagtagacataatagcaacagacatacaaactaaag

SEQ ID NO: 19138 - DNA, 301 bp, Artificial Sequence
  Rb1.1_NTC.23
  crRNA array
  misc_feature (148)..(157): n is a, c, g, or t
cttggctttatatatcttgtggaaaggacgaaacaccgtaatttctactaagtgtagattctgacatgatcgggtaccttaatttctactaagtgtagatacgcgctattatcgtaggtgtaatttctactaagtgtagatttttttnnnnnnnnnnaagcttggcgtggatccgatatcaactagatcttgagacaaatggcagtattcatccacaattttaaaagaaaaggggggattggggggtacagtgcaggggaaagaatagtagacataatagcaacagacatacaaactaaag

SEQ ID NO: 19139 - DNA, 301 bp, Artificial Sequence
  Rb1.1_NTC.24
  crRNA array
  misc_feature (148)..(157): n is a, c, g, or t
cttggctttatatatcttgtggaaaggacgaaacaccgtaatttctactaagtgtagattctgacatgatcgggtaccttaatttctactaagtgtagatactatcgacgttcgtcccggtaatttctactaagtgtagatttttttnnnnnnnnnnaagcttggcgtggatccgatatcaactagatcttgagacaaatggcagtattcatccacaattttaaaagaaaaggggggattggggggtacagtgcaggggaaagaatagtagacataatagcaacagacatacaaactaaag

SEQ ID NO: 19140 - DNA, 301 bp, Artificial Sequence
  Rb1.1_NTC.25
  crRNA array
  misc_feature (148)..(157): n is a, c, g, or t
cttggctttatatatcttgtggaaaggacgaaacaccgtaatttctactaagtgtagattctgacatgatcgggtaccttaatttctactaagtgtagattcgcgttatcgtgccgtgcgtaatttctactaagtgtagatttttttnnnnnnnnnnaagcttggcgtggatccgatatcaactagatcttgagacaaatggcagtattcatccacaattttaaaagaaaaggggggattggggggtacagtgcaggggaaagaatagtagacataatagcaacagacatacaaactaaag

SEQ ID NO: 19141 - DNA, 301 bp, Artificial Sequence
  Rb1.1_NTC.26
  crRNA array
  misc_feature (148)..(157): n is a, c, g, or t
cttggctttatatatcttgtggaaaggacgaaacaccgtaatttctactaagtgtagattctgacatgatcgggtaccttaatttctactaagtgtagatcgcgacggcggttttaacactaatttctactaagtgtagatttttttnnnnnnnnnnaagcttggcgtggatccgatatcaactagatcttgagacaaatggcagtattcatccacaattttaaaagaaaaggggggattggggggtacagtgcaggggaaagaatagtagacataatagcaacagacatacaaactaaag

SEQ ID NO: 19142 - DNA, 301 bp, Artificial Sequence
  Rb1.1_NTC.27
  crRNA array
  misc_feature (148)..(157): n is a, c, g, or t
cttggctttatatatcttgtggaaaggacgaaacaccgtaatttctactaagtgtagattctgacatgatcgggtaccttaatttctactaagtgtagatgtcgcgttgcgaccggcgcttaatttctactaagtgtagatttttttnnnnnnnnnnaagcttggcgtggatccgatatcaactagatcttgagacaaatggcagtattcatccacaattttaaaagaaaaggggggattggggggtacagtgcaggggaaagaatagtagacataatagcaacagacatacaaactaaag

SEQ ID NO: 19143 - DNA, 301 bp, Artificial Sequence
  Rb1.1_NTC.28
  crRNA array
  misc_feature (148)..(157): n is a, c, g, or t
cttggctttatatatcttgtggaaaggacgaaacaccgtaatttctactaagtgtagattctgacatgatcgggtaccttaatttctactaagtgtagataccgctaatcggcgtaaacttaatttctactaagtgtagatttttttnnnnnnnnnnaagcttggcgtggatccgatatcaactagatcttgagacaaatggcagtattcatccacaattttaaaagaaaaggggggattggggggtacagtgcaggggaaagaatagtagacataatagcaacagacatacaaactaaag

SEQ ID NO: 19144 - DNA, 301 bp, Artificial Sequence
  Rb1.1_NTC.29
  crRNA array
  misc_feature (148)..(157): n is a, c, g, or t
cttggctttatatatcttgtggaaaggacgaaacaccgtaatttctactaagtgtagattctgacatgatcgggtaccttaatttctactaagtgtagatcgcgatctataccgtctatataatttctactaagtgtagatttttttnnnnnnnnnnaagcttggcgtggatccgatatcaactagatcttgagacaaatggcagtattcatccacaattttaaaagaaaaggggggattggggggtacagtgcaggggaaagaatagtagacataatagcaacagacatacaaactaaag

SEQ ID NO: 19145 - DNA, 301 bp, Artificial Sequence
  Rb1.1_NTC.3
  crRNA array
  misc_feature (148)..(157): n is a, c, g, or t
cttggctttatatatcttgtggaaaggacgaaacaccgtaatttctactaagtgtagattctgacatgatcgggtaccttaatttctactaagtgtagattcgacgcgagacgacgtacataatttctactaagtgtagatttttttnnnnnnnnnnaagcttggcgtggatccgatatcaactagatcttgagacaaatggcagtattcatccacaattttaaaagaaaaggggggattggggggtacagtgcaggggaaagaatagtagacataatagcaacagacatacaaactaaag

SEQ ID NO: 19146 - DNA, 301 bp, Artificial Sequence
  Rb1.1_NTC.30
  crRNA array
  misc_feature (148)..(157): n is a, c, g, or t
cttggctttatatatcttgtggaaaggacgaaacaccgtaatttctactaagtgtagattctgacatgatcgggtaccttaatttctactaagtgtagatcgatcgtacgggtgtcctaataatttctactaagtgtagatttttttnnnnnnnnnnaagcttggcgtggatccgatatcaactagatcttgagacaaatggcagtattcatccacaattttaaaagaaaaggggggattggggggtacagtgcaggggaaagaatagtagacataatagcaacagacatacaaactaaag

SEQ ID NO: 19147 - DNA, 301 bp, Artificial Sequence
  Rb1.1_NTC.31
  crRNA array
  misc_feature (148)..(157): n is a, c, g, or t
cttggctttatatatcttgtggaaaggacgaaacaccgtaatttctactaagtgtagattctgacatgatcgggtaccttaatttctactaagtgtagatgccgaccgcgtgattgtaggtaatttctactaagtgtagatttttttnnnnnnnnnnaagcttggcgtggatccgatatcaactagatcttgagacaaatggcagtattcatccacaattttaaaagaaaaggggggattggggggtacagtgcaggggaaagaatagtagacataatagcaacagacatacaaactaaag

SEQ ID NO: 19148 - DNA, 301 bp, Artificial Sequence
  Rb1.1_NTC.32
  crRNA array
  misc_feature (148)..(157): n is a, c, g, or t
cttggctttatatatcttgtggaaaggacgaaacaccgtaatttctactaagtgtagattctgacatgatcgggtaccttaatttctactaagtgtagatgcacgttacgcccgggtcactaatttctactaagtgtagatttttttnnnnnnnnnnaagcttggcgtggatccgatatcaactagatcttgagacaaatggcagtattcatccacaattttaaaagaaaaggggggattggggggtacagtgcaggggaaagaatagtagacataatagcaacagacatacaaactaaag

SEQ ID NO: 19149 - DNA, 301 bp, Artificial Sequence
  Rb1.1_NTC.33
  crRNA array
  misc_feature (148)..(157): n is a, c, g, or t
cttggctttatatatcttgtggaaaggacgaaacaccgtaatttctactaagtgtagattctgacatgatcgggtaccttaatttctactaagtgtagattaagcgaccgacgcattcgctaatttctactaagtgtagatttttttnnnnnnnnnnaagcttggcgtggatccgatatcaactagatcttgagacaaatggcagtattcatccacaattttaaaagaaaaggggggattggggggtacagtgcaggggaaagaatagtagacataatagcaacagacatacaaactaaag

SEQ ID NO: 19150 - DNA, 301 bp, Artificial Sequence
  Rb1.1_NTC.34
  crRNA array
  misc_feature (148)..(157): n is a, c, g, or t
cttggctttatatatcttgtggaaaggacgaaacaccgtaatttctactaagtgtagattctgacatgatcgggtaccttaatttctactaagtgtagattagcgttcgacacgtgaaactaatttctactaagtgtagatttttttnnnnnnnnnnaagcttggcgtggatccgatatcaactagatcttgagacaaatggcagtattcatccacaattttaaaagaaaaggggggattggggggtacagtgcaggggaaagaatagtagacataatagcaacagacatacaaactaaag

SEQ ID NO: 19151 - DNA, 301 bp, Artificial Sequence
  Rb1.1_NTC.35
  crRNA array
  misc_feature (148)..(157): n is a, c, g, or t
cttggctttatatatcttgtggaaaggacgaaacaccgtaatttctactaagtgtagattctgacatgatcgggtaccttaatttctactaagtgtagattggcgcgtaatcgctattcgtaatttctactaagtgtagatttttttnnnnnnnnnnaagcttggcgtggatccgatatcaactagatcttgagacaaatggcagtattcatccacaattttaaaagaaaaggggggattggggggtacagtgcaggggaaagaatagtagacataatagcaacagacatacaaactaaag

SEQ ID NO: 19152 - DNA, 301 bp, Artificial Sequence
  Rb1.1_NTC.36
  crRNA array
  misc_feature (148)..(157): n is a, c, g, or t
cttggctttatatatcttgtggaaaggacgaaacaccgtaatttctactaagtgtagattctgacatgatcgggtaccttaatttctactaagtgtagatcaacccgccgtagcgggccttaatttctactaagtgtagatttttttnnnnnnnnnnaagcttggcgtggatccgatatcaactagatcttgagacaaatggcagtattcatccacaattttaaaagaaaaggggggattggggggtacagtgcaggggaaagaatagtagacataatagcaacagacatacaaactaaag

SEQ ID NO: 19153 - DNA, 301 bp, Artificial Sequence
  Rb1.1_NTC.37
  crRNA array
  misc_feature (148)..(157): n is a, c, g, or t
cttggctttatatatcttgtggaaaggacgaaacaccgtaatttctactaagtgtagattctgacatgatcgggtaccttaatttctactaagtgtagattttgcgttgacgcgattacttaatttctactaagtgtagatttttttnnnnnnnnnnaagcttggcgtggatccgatatcaactagatcttgagacaaatggcagtattcatccacaattttaaaagaaaaggggggattggggggtacagtgcaggggaaagaatagtagacataatagcaacagacatacaaactaaag

SEQ ID NO: 19154 - DNA, 301 bp, Artificial Sequence
  Rb1.1_NTC.38
  crRNA array
  misc_feature (148)..(157): n is a, c, g, or t
cttggctttatatatcttgtggaaaggacgaaacaccgtaatttctactaagtgtagattctgacatgatcgggtaccttaatttctactaagtgtagataacggagcgcgatactaccataatttctactaagtgtagatttttttnnnnnnnnnnaagcttggcgtggatccgatatcaactagatcttgagacaaatggcagtattcatccacaattttaaaagaaaaggggggattggggggtacagtgcaggggaaagaatagtagacataatagcaacagacatacaaactaaag

SEQ ID NO: 19155 - DNA, 301 bp, Artificial Sequence
  Rb1.1_NTC.39
  crRNA array
  misc_feature (148)..(157): n is a, c, g, or t
cttggctttatatatcttgtggaaaggacgaaacaccgtaatttctactaagtgtagattctgacatgatcgggtaccttaatttctactaagtgtagatccggacgttataacgtttcttaatttctactaagtgtagatttttttnnnnnnnnnnaagcttggcgtggatccgatatcaactagatcttgagacaaatggcagtattcatccacaattttaaaagaaaaggggggattggggggtacagtgcaggggaaagaatagtagacataatagcaacagacatacaaactaaag

SEQ ID NO: 19156 - DNA, 301 bp, Artificial Sequence
  Rb1.1_NTC.4
  crRNA array
  misc_feature (148)..(157): n is a, c, g, or t
cttggctttatatatcttgtggaaaggacgaaacaccgtaatttctactaagtgtagattctgacatgatcgggtaccttaatttctactaagtgtagatatacccgtcgcgaacgtgagtaatttctactaagtgtagatttttttnnnnnnnnnnaagcttggcgtggatccgatatcaactagatcttgagacaaatggcagtattcatccacaattttaaaagaaaaggggggattggggggtacagtgcaggggaaagaatagtagacataatagcaacagacatacaaactaaag

SEQ ID NO: 19157 - DNA, 301 bp, Artificial Sequence
  Rb1.1_NTC.40
  crRNA array
  misc_feature (148)..(157): n is a, c, g, or t
cttggctttatatatcttgtggaaaggacgaaacaccgtaatttctactaagtgtagattctgacatgatcgggtaccttaatttctactaagtgtagatattcgcgaacccggccggaataatttctactaagtgtagatttttttnnnnnnnnnnaagcttggcgtggatccgatatcaactagatcttgagacaaatggcagtattcatccacaattttaaaagaaaaggggggattggggggtacagtgcaggggaaagaatagtagacataatagcaacagacatacaaactaaag

SEQ ID NO: 19158 - DNA, 301 bp, Artificial Sequence
  Rb1.1_NTC.41
  crRNA array
  misc_feature (148)..(157): n is a, c, g, or t
cttggctttatatatcttgtggaaaggacgaaacaccgtaatttctactaagtgtagattctgacatgatcgggtaccttaatttctactaagtgtagatttgatggcgcgacgcgttattaatttctactaagtgtagatttttttnnnnnnnnnnaagcttggcgtggatccgatatcaactagatcttgagacaaatggcagtattcatccacaattttaaaagaaaaggggggattggggggtacagtgcaggggaaagaatagtagacataatagcaacagacatacaaactaaag

SEQ ID NO: 19159 - DNA, 301 bp, Artificial Sequence
  Rb1.1_NTC.42
  crRNA array
  misc_feature (148)..(157): n is a, c, g, or t
cttggctttatatatcttgtggaaaggacgaaacaccgtaatttctactaagtgtagattctgacatgatcgggtaccttaatttctactaagtgtagatggtcaaatcgcggcgataactaatttctactaagtgtagatttttttnnnnnnnnnnaagcttggcgtggatccgatatcaactagatcttgagacaaatggcagtattcatccacaattttaaaagaaaaggggggattggggggtacagtgcaggggaaagaatagtagacataatagcaacagacatacaaactaaag

SEQ ID NO: 19160 - DNA, 301 bp, Artificial Sequence
  Rb1.1_NTC.43
  crRNA array
  misc_feature (148)..(157): n is a, c, g, or t
cttggctttatatatcttgtggaaaggacgaaacaccgtaatttctactaagtgtagattctgacatgatcgggtaccttaatttctactaagtgtagatcgactcgcgcattgaactggtaatttctactaagtgtagatttttttnnnnnnnnnnaagcttggcgtggatccgatatcaactagatcttgagacaaatggcagtattcatccacaattttaaaagaaaaggggggattggggggtacagtgcaggggaaagaatagtagacataatagcaacagacatacaaactaaag

SEQ ID NO: 19161 - DNA, 301 bp, Artificial Sequence
  Rb1.1_NTC.44
  crRNA array
  misc_feature (148)..(157): n is a, c, g, or t
cttggctttatatatcttgtggaaaggacgaaacaccgtaatttctactaagtgtagattctgacatgatcgggtaccttaatttctactaagtgtagatagcgtcgtacgatttatcgttaatttctactaagtgtagatttttttnnnnnnnnnnaagcttggcgtggatccgatatcaactagatcttgagacaaatggcagtattcatccacaattttaaaagaaaaggggggattggggggtacagtgcaggggaaagaatagtagacataatagcaacagacatacaaactaaag

SEQ ID NO: 19162 - DNA, 301 bp, Artificial Sequence
  Rb1.1_NTC.45
  crRNA array
  misc_feature (148)..(157): n is a, c, g, or t
cttggctttatatatcttgtggaaaggacgaaacaccgtaatttctactaagtgtagattctgacatgatcgggtaccttaatttctactaagtgtagatcggaacgcgtgatactagggtaatttctactaagtgtagatttttttnnnnnnnnnnaagcttggcgtggatccgatatcaactagatcttgagacaaatggcagtattcatccacaattttaaaagaaaaggggggattggggggtacagtgcaggggaaagaatagtagacataatagcaacagacatacaaactaaag

SEQ ID NO: 19163 - DNA, 301 bp, Artificial Sequence
  Rb1.1_NTC.46
  crRNA array
  misc_feature (148)..(157): n is a, c, g, or t
cttggctttatatatcttgtggaaaggacgaaacaccgtaatttctactaagtgtagattctgacatgatcgggtaccttaatttctactaagtgtagatagcgggtcgtagacgcgcggtaatttctactaagtgtagatttttttnnnnnnnnnnaagcttggcgtggatccgatatcaactagatcttgagacaaatggcagtattcatccacaattttaaaagaaaaggggggattggggggtacagtgcaggggaaagaatagtagacataatagcaacagacatacaaactaaag

SEQ ID NO: 19164 - DNA, 301 bp, Artificial Sequence
  Rb1.1_NTC.47
  crRNA array
  misc_feature (148)..(157): n is a, c, g, or t
cttggctttatatatcttgtggaaaggacgaaacaccgtaatttctactaagtgtagattctgacatgatcgggtaccttaatttctactaagtgtagattctcgtatcgcgattgttaataatttctactaagtgtagatttttttnnnnnnnnnnaagcttggcgtggatccgatatcaactagatcttgagacaaatggcagtattcatccacaattttaaaagaaaaggggggattggggggtacagtgcaggggaaagaatagtagacataatagcaacagacatacaaactaaag

SEQ ID NO: 19165 - DNA, 301 bp, Artificial Sequence
  Rb1.1_NTC.48
  crRNA array
  misc_feature (148)..(157): n is a, c, g, or t
cttggctttatatatcttgtggaaaggacgaaacaccgtaatttctactaagtgtagattctgacatgatcgggtaccttaatttctactaagtgtagatcggtcgactacggctgttagtaatttctactaagtgtagatttttttnnnnnnnnnnaagcttggcgtggatccgatatcaactagatcttgagacaaatggcagtattcatccacaattttaaaagaaaaggggggattggggggtacagtgcaggggaaagaatagtagacataatagcaacagacatacaaactaaag

SEQ ID NO: 19166 - DNA, 301 bp, Artificial Sequence
  Rb1.1_NTC.49
  crRNA array
  misc_feature (148)..(157): n is a, c, g, or t
cttggctttatatatcttgtggaaaggacgaaacaccgtaatttctactaagtgtagattctgacatgatcgggtaccttaatttctactaagtgtagattcggggcgcgtcaactgaattaatttctactaagtgtagatttttttnnnnnnnnnnaagcttggcgtggatccgatatcaactagatcttgagacaaatggcagtattcatccacaattttaaaagaaaaggggggattggggggtacagtgcaggggaaagaatagtagacataatagcaacagacatacaaactaaag

SEQ ID NO: 19167 - DNA, 301 bp, Artificial Sequence
  Rb1.1_NTC.5
  crRNA array
  misc_feature (148)..(157): n is a, c, g, or t
cttggctttatatatcttgtggaaaggacgaaacaccgtaatttctactaagtgtagattctgacatgatcgggtaccttaatttctactaagtgtagatgcttacgcgtcgcgaatgtataatttctactaagtgtagatttttttnnnnnnnnnnaagcttggcgtggatccgatatcaactagatcttgagacaaatggcagtattcatccacaattttaaaagaaaaggggggattggggggtacagtgcaggggaaagaatagtagacataatagcaacagacatacaaactaaag

SEQ ID NO: 19168 - DNA, 301 bp, Artificial Sequence
  Rb1.1_NTC.50
  crRNA array
  misc_feature (148)..(157): n is a, c, g, or t
cttggctttatatatcttgtggaaaggacgaaacaccgtaatttctactaagtgtagattctgacatgatcgggtaccttaatttctactaagtgtagatattgccgctcgcgcaaaatctaatttctactaagtgtagatttttttnnnnnnnnnnaagcttggcgtggatccgatatcaactagatcttgagacaaatggcagtattcatccacaattttaaaagaaaaggggggattggggggtacagtgcaggggaaagaatagtagacataatagcaacagacatacaaactaaag

SEQ ID NO: 19169 - DNA, 301 bp, Artificial Sequence
  Rb1.1_NTC.51
  crRNA array
  misc_feature (148)..(157): n is a, c, g, or t
cttggctttatatatcttgtggaaaggacgaaacaccgtaatttctactaagtgtagattctgacatgatcgggtaccttaatttctactaagtgtagattaacgcgcaacacgccaatgtaatttctactaagtgtagatttttttnnnnnnnnnnaagcttggcgtggatccgatatcaactagatcttgagacaaatggcagtattcatccacaattttaaaagaaaaggggggattggggggtacagtgcaggggaaagaatagtagacataatagcaacagacatacaaactaaag

SEQ ID NO: 19170 - DNA, 301 bp, Artificial Sequence
  Rb1.1_NTC.6
  crRNA array
  misc_feature (148)..(157): n is a, c, g, or t
cttggctttatatatcttgtggaaaggacgaaacaccgtaatttctactaagtgtagattctgacatgatcgggtaccttaatttctactaagtgtagatcgaatcgcgcctacgggaattaatttctactaagtgtagatttttttnnnnnnnnnnaagcttggcgtggatccgatatcaactagatcttgagacaaatggcagtattcatccacaattttaaaagaaaaggggggattggggggtacagtgcaggggaaagaatagtagacataatagcaacagacatacaaactaaag

SEQ ID NO: 19171 - DNA, 301 bp, Artificial Sequence
  Rb1.1_NTC.7
  crRNA array
  misc_feature (148)..(157): n is a, c, g, or t
cttggctttatatatcttgtggaaaggacgaaacaccgtaatttctactaagtgtagattctgacatgatcgggtaccttaatttctactaagtgtagatcgccgaacggataagactattaatttctactaagtgtagatttttttnnnnnnnnnnaagcttggcgtggatccgatatcaactagatcttgagacaaatggcagtattcatccacaattttaaaagaaaaggggggattggggggtacagtgcaggggaaagaatagtagacataatagcaacagacatacaaactaaag

SEQ ID NO: 19172 - DNA, 301 bp, Artificial Sequence
  Rb1.1_NTC.8
  crRNA array
  misc_feature (148)..(157): n is a, c, g, or t
cttggctttatatatcttgtggaaaggacgaaacaccgtaatttctactaagtgtagattctgacatgatcgggtaccttaatttctactaagtgtagatcgaccgaggttacgctgggataatttctactaagtgtagatttttttnnnnnnnnnnaagcttggcgtggatccgatatcaactagatcttgagacaaatggcagtattcatccacaattttaaaagaaaaggggggattggggggtacagtgcaggggaaagaatagtagacataatagcaacagacatacaaactaaag

SEQ ID NO: 19173 - DNA, 301 bp, Artificial Sequence
  Rb1.1_NTC.9
  crRNA array
  misc_feature (148)..(157): n is a, c, g, or t
cttggctttatatatcttgtggaaaggacgaaacaccgtaatttctactaagtgtagattctgacatgatcgggtaccttaatttctactaagtgtagatatcgccgtacggctatggcataatttctactaagtgtagatttttttnnnnnnnnnnaagcttggcgtggatccgatatcaactagatcttgagacaaatggcagtattcatccacaattttaaaagaaaaggggggattggggggtacagtgcaggggaaagaatagtagacataatagcaacagacatacaaactaaag

SEQ ID NO: 19174 - DNA, 301 bp, Artificial Sequence
  Rb1.2_NTC.0
  crRNA array
  misc_feature (148)..(157): n is a, c, g, or t
cttggctttatatatcttgtggaaaggacgaaacaccgtaatttctactaagtgtagatgtctctgcatgaaaacggagtaatttctactaagtgtagattatagcgtcgcgcgctaatttaatttctactaagtgtagatttttttnnnnnnnnnnaagcttggcgtggatccgatatcaactagatcttgagacaaatggcagtattcatccacaattttaaaagaaaaggggggattggggggtacagtgcaggggaaagaatagtagacataatagcaacagacatacaaactaaag

SEQ ID NO: 19175 - DNA, 301 bp, Artificial Sequence
  Rb1.2_NTC.1
  crRNA array
  misc_feature (148)..(157): n is a, c, g, or t
cttggctttatatatcttgtggaaaggacgaaacaccgtaatttctactaagtgtagatgtctctgcatgaaaacggagtaatttctactaagtgtagatcgcgtaaccgttccggctcctaatttctactaagtgtagatttttttnnnnnnnnnnaagcttggcgtggatccgatatcaactagatcttgagacaaatggcagtattcatccacaattttaaaagaaaaggggggattggggggtacagtgcaggggaaagaatagtagacataatagcaacagacatacaaactaaag

SEQ ID NO: 19176 - DNA, 301 bp, Artificial Sequence
  Rb1.2_NTC.10
  crRNA array
  misc_feature (148)..(157): n is a, c, g, or t
cttggctttatatatcttgtggaaaggacgaaacaccgtaatttctactaagtgtagatgtctctgcatgaaaacggagtaatttctactaagtgtagatcgctaagttcgcgcgggccgtaatttctactaagtgtagatttttttnnnnnnnnnnaagcttggcgtggatccgatatcaactagatcttgagacaaatggcagtattcatccacaattttaaaagaaaaggggggattggggggtacagtgcaggggaaagaatagtagacataatagcaacagacatacaaactaaag

SEQ ID NO: 19177 - DNA, 301 bp, Artificial Sequence
  Rb1.2_NTC.11
  crRNA array
  misc_feature (148)..(157): n is a, c, g, or t
cttggctttatatatcttgtggaaaggacgaaacaccgtaatttctactaagtgtagatgtctctgcatgaaaacggagtaatttctactaagtgtagatcgttcgtcgacgaagcaatctaatttctactaagtgtagatttttttnnnnnnnnnnaagcttggcgtggatccgatatcaactagatcttgagacaaatggcagtattcatccacaattttaaaagaaaaggggggattggggggtacagtgcaggggaaagaatagtagacataatagcaacagacatacaaactaaag

SEQ ID NO: 19178 - DNA, 301 bp, Artificial Sequence
  Rb1.2_NTC.12
  crRNA array
  misc_feature (148)..(157): n is a, c, g, or t
cttggctttatatatcttgtggaaaggacgaaacaccgtaatttctactaagtgtagatgtctctgcatgaaaacggagtaatttctactaagtgtagatcgccgacgattaatcaatagtaatttctactaagtgtagatttttttnnnnnnnnnnaagcttggcgtggatccgatatcaactagatcttgagacaaatggcagtattcatccacaattttaaaagaaaaggggggattggggggtacagtgcaggggaaagaatagtagacataatagcaacagacatacaaactaaag

SEQ ID NO: 19179 - DNA, 301 bp, Artificial Sequence
  Rb1.2_NTC.13
  crRNA array
  misc_feature (148)..(157): n is a, c, g, or t
cttggctttatatatcttgtggaaaggacgaaacaccgtaatttctactaagtgtagatgtctctgcatgaaaacggagtaatttctactaagtgtagatgaccgttgtatcgcgatcaataatttctactaagtgtagatttttttnnnnnnnnnnaagcttggcgtggatccgatatcaactagatcttgagacaaatggcagtattcatccacaattttaaaagaaaaggggggattggggggtacagtgcaggggaaagaatagtagacataatagcaacagacatacaaactaaag

SEQ ID NO: 19180 - DNA, 301 bp, Artificial Sequence
  Rb1.2_NTC.14
  crRNA array
  misc_feature (148)..(157): n is a, c, g, or t
cttggctttatatatcttgtggaaaggacgaaacaccgtaatttctactaagtgtagatgtctctgcatgaaaacggagtaatttctactaagtgtagatccgttcgtgcgatagtgttttaatttctactaagtgtagatttttttnnnnnnnnnnaagcttggcgtggatccgatatcaactagatcttgagacaaatggcagtattcatccacaattttaaaagaaaaggggggattggggggtacagtgcaggggaaagaatagtagacataatagcaacagacatacaaactaaag

SEQ ID NO: 19181 - DNA, 301 bp, Artificial Sequence
  Rb1.2_NTC.15
  crRNA array
  misc_feature (148)..(157): n is a, c, g, or t
cttggctttatatatcttgtggaaaggacgaaacaccgtaatttctactaagtgtagatgtctctgcatgaaaacggagtaatttctactaagtgtagatgttgtcgtgccgcgaatttataatttctactaagtgtagatttttttnnnnnnnnnnaagcttggcgtggatccgatatcaactagatcttgagacaaatggcagtattcatccacaattttaaaagaaaaggggggattggggggtacagtgcaggggaaagaatagtagacataatagcaacagacatacaaactaaag

SEQ ID NO: 19182 - DNA, 301 bp, Artificial Sequence
  Rb1.2_NTC.16
  crRNA array
  misc_feature (148)..(157): n is a, c, g, or t
cttggctttatatatcttgtggaaaggacgaaacaccgtaatttctactaagtgtagatgtctctgcatgaaaacggagtaatttctactaagtgtagatcggtacgttagacgaaaatttaatttctactaagtgtagatttttttnnnnnnnnnnaagcttggcgtggatccgatatcaactagatcttgagacaaatggcagtattcatccacaattttaaaagaaaaggggggattggggggtacagtgcaggggaaagaatagtagacataatagcaacagacatacaaactaaag

SEQ ID NO: 19183 - DNA, 301 bp, Artificial Sequence
  Rb1.2_NTC.17
  crRNA array
  misc_feature (148)..(157): n is a, c, g, or t
cttggctttatatatcttgtggaaaggacgaaacaccgtaatttctactaagtgtagatgtctctgcatgaaaacggagtaatttctactaagtgtagattatcgaacgctatcgaacgttaatttctactaagtgtagatttttttnnnnnnnnnnaagcttggcgtggatccgatatcaactagatcttgagacaaatggcagtattcatccacaattttaaaagaaaaggggggattggggggtacagtgcaggggaaagaatagtagacataatagcaacagacatacaaactaaag

SEQ ID NO: 19184 - DNA, 301 bp, Artificial Sequence
  Rb1.2_NTC.18
  crRNA array
  misc_feature (148)..(157): n is a, c, g, or t
cttggctttatatatcttgtggaaaggacgaaacaccgtaatttctactaagtgtagatgtctctgcatgaaaacggagtaatttctactaagtgtagattccggttacgaccggcaaaataatttctactaagtgtagatttttttnnnnnnnnnnaagcttggcgtggatccgatatcaactagatcttgagacaaatggcagtattcatccacaattttaaaagaaaaggggggattggggggtacagtgcaggggaaagaatagtagacataatagcaacagacatacaaactaaag

SEQ ID NO: 19185 - DNA, 301 bp, Artificial Sequence
  Rb1.2_NTC.19
  crRNA array
  misc_feature (148)..(157): n is a, c, g, or t
cttggctttatatatcttgtggaaaggacgaaacaccgtaatttctactaagtgtagatgtctctgcatgaaaacggagtaatttctactaagtgtagatcgtcgtagaacgatacccgataatttctactaagtgtagatttttttnnnnnnnnnnaagcttggcgtggatccgatatcaactagatcttgagacaaatggcagtattcatccacaattttaaaagaaaaggggggattggggggtacagtgcaggggaaagaatagtagacataatagcaacagacatacaaactaaag

SEQ ID NO: 19186 - DNA, 301 bp, Artificial Sequence
  Rb1.2_NTC.2
  crRNA array
  misc_feature (148)..(157): n is a, c, g, or t
cttggctttatatatcttgtggaaaggacgaaacaccgtaatttctactaagtgtagatgtctctgcatgaaaacggagtaatttctactaagtgtagatttatgtcgcgccgcgacccgtaatttctactaagtgtagatttttttnnnnnnnnnnaagcttggcgtggatccgatatcaactagatcttgagacaaatggcagtattcatccacaattttaaaagaaaaggggggattggggggtacagtgcaggggaaagaatagtagacataatagcaacagacatacaaactaaag

SEQ ID NO: 19187 - DNA, 301 bp, Artificial Sequence
  Rb1.2_NTC.20
  crRNA array
  misc_feature (148)..(157): n is a, c, g, or t
cttggctttatatatcttgtggaaaggacgaaacaccgtaatttctactaagtgtagatgtctctgcatgaaaacggagtaatttctactaagtgtagatattccggcgcgaccagaagataatttctactaagtgtagatttttttnnnnnnnnnnaagcttggcgtggatccgatatcaactagatcttgagacaaatggcagtattcatccacaattttaaaagaaaaggggggattggggggtacagtgcaggggaaagaatagtagacataatagcaacagacatacaaactaaag

SEQ ID NO: 19188 - DNA, 301 bp, Artificial Sequence
  Rb1.2_NTC.21
  crRNA array
  misc_feature (148)..(157): n is a, c, g, or t
cttggctttatatatcttgtggaaaggacgaaacaccgtaatttctactaagtgtagatgtctctgcatgaaaacggagtaatttctactaagtgtagatgtataacttcgcgcggtccgtaatttctactaagtgtagatttttttnnnnnnnnnnaagcttggcgtggatccgatatcaactagatcttgagacaaatggcagtattcatccacaattttaaaagaaaaggggggattggggggtacagtgcaggggaaagaatagtagacataatagcaacagacatacaaactaaag

SEQ ID NO: 19189 - DNA, 301 bp, Artificial Sequence
  Rb1.2_NTC.22
  crRNA array
  misc_feature (148)..(157): n is a, c, g, or t
cttggctttatatatcttgtggaaaggacgaaacaccgtaatttctactaagtgtagatgtctctgcatgaaaacggagtaatttctactaagtgtagatgcgcgtcaacgtaatgtgcctaatttctactaagtgtagatttttttnnnnnnnnnnaagcttggcgtggatccgatatcaactagatcttgagacaaatggcagtattcatccacaattttaaaagaaaaggggggattggggggtacagtgcaggggaaagaatagtagacataatagcaacagacatacaaactaaag

SEQ ID NO: 19190 - DNA, 301 bp, Artificial Sequence
  Rb1.2_NTC.23
  crRNA array
  misc_feature (148)..(157): n is a, c, g, or t
cttggctttatatatcttgtggaaaggacgaaacaccgtaatttctactaagtgtagatgtctctgcatgaaaacggagtaatttctactaagtgtagatacgcgctattatcgtaggtgtaatttctactaagtgtagatttttttnnnnnnnnnnaagcttggcgtggatccgatatcaactagatcttgagacaaatggcagtattcatccacaattttaaaagaaaaggggggattggggggtacagtgcaggggaaagaatagtagacataatagcaacagacatacaaactaaag

SEQ ID NO: 19191 - DNA, 301 bp, Artificial Sequence
  Rb1.2_NTC.24
  crRNA array
  misc_feature (148)..(157): n is a, c, g, or t
cttggctttatatatcttgtggaaaggacgaaacaccgtaatttctactaagtgtagatgtctctgcatgaaaacggagtaatttctactaagtgtagatactatcgacgttcgtcccggtaatttctactaagtgtagatttttttnnnnnnnnnnaagcttggcgtggatccgatatcaactagatcttgagacaaatggcagtattcatccacaattttaaaagaaaaggggggattggggggtacagtgcaggggaaagaatagtagacataatagcaacagacatacaaactaaag

SEQ ID NO: 19192 - DNA, 301 bp, Artificial Sequence
  Rb1.2_NTC.25
  crRNA array
  misc_feature (148)..(157): n is a, c, g, or t
cttggctttatatatcttgtggaaaggacgaaacaccgtaatttctactaagtgtagatgtctctgcatgaaaacggagtaatttctactaagtgtagattcgcgttatcgtgccgtgcgtaatttctactaagtgtagatttttttnnnnnnnnnnaagcttggcgtggatccgatatcaactagatcttgagacaaatggcagtattcatccacaattttaaaagaaaaggggggattggggggtacagtgcaggggaaagaatagtagacataatagcaacagacatacaaactaaag

SEQ ID NO: 19193 - DNA, 301 bp, Artificial Sequence
  Rb1.2_NTC.26
  crRNA array
  misc_feature (148)..(157): n is a, c, g, or t
cttggctttatatatcttgtggaaaggacgaaacaccgtaatttctactaagtgtagatgtctctgcatgaaaacggagtaatttctactaagtgtagatcgcgacggcggttttaacactaatttctactaagtgtagatttttttnnnnnnnnnnaagcttggcgtggatccgatatcaactagatcttgagacaaatggcagtattcatccacaattttaaaagaaaaggggggattggggggtacagtgcaggggaaagaatagtagacataatagcaacagacatacaaactaaag

SEQ ID NO: 19194 - DNA, 301 bp, Artificial Sequence
  Rb1.2_NTC.27
  crRNA array
  misc_feature (148)..(157): n is a, c, g, or t
cttggctttatatatcttgtggaaaggacgaaacaccgtaatttctactaagtgtagatgtctctgcatgaaaacggagtaatttctactaagtgtagatgtcgcgttgcgaccggcgcttaatttctactaagtgtagatttttttnnnnnnnnnnaagcttggcgtggatccgatatcaactagatcttgagacaaatggcagtattcatccacaattttaaaagaaaaggggggattggggggtacagtgcaggggaaagaatagtagacataatagcaacagacatacaaactaaag

SEQ ID NO: 19195 - DNA, 301 bp, Artificial Sequence
  Rb1.2_NTC.28
  crRNA array
  misc_feature (148)..(157): n is a, c, g, or t
cttggctttatatatcttgtggaaaggacgaaacaccgtaatttctactaagtgtagatgtctctgcatgaaaacggagtaatttctactaagtgtagataccgctaatcggcgtaaacttaatttctactaagtgtagatttttttnnnnnnnnnnaagcttggcgtggatccgatatcaactagatcttgagacaaatggcagtattcatccacaattttaaaagaaaaggggggattggggggtacagtgcaggggaaagaatagtagacataatagcaacagacatacaaactaaag

SEQ ID NO: 19196 - DNA, 301 bp, Artificial Sequence
  Rb1.2_NTC.29
  crRNA array
  misc_feature (148)..(157): n is a, c, g, or t
cttggctttatatatcttgtggaaaggacgaaacaccgtaatttctactaagtgtagatgtctctgcatgaaaacggagtaatttctactaagtgtagatcgcgatctataccgtctatataatttctactaagtgtagatttttttnnnnnnnnnnaagcttggcgtggatccgatatcaactagatcttgagacaaatggcagtattcatccacaattttaaaagaaaaggggggattggggggtacagtgcaggggaaagaatagtagacataatagcaacagacatacaaactaaag

SEQ ID NO: 19197 - DNA, 301 bp, Artificial Sequence
  Rb1.2_NTC.3
  crRNA array
  misc_feature (148)..(157): n is a, c, g, or t
cttggctttatatatcttgtggaaaggacgaaacaccgtaatttctactaagtgtagatgtctctgcatgaaaacggagtaatttctactaagtgtagattcgacgcgagacgacgtacataatttctactaagtgtagatttttttnnnnnnnnnnaagcttggcgtggatccgatatcaactagatcttgagacaaatggcagtattcatccacaattttaaaagaaaaggggggattggggggtacagtgcaggggaaagaatagtagacataatagcaacagacatacaaactaaag

SEQ ID NO: 19198 - DNA, 301 bp, Artificial Sequence
  Rb1.2_NTC.30
  crRNA array
  misc_feature (148)..(157): n is a, c, g, or t
cttggctttatatatcttgtggaaaggacgaaacaccgtaatttctactaagtgtagatgtctctgcatgaaaacggagtaatttctactaagtgtagatcgatcgtacgggtgtcctaataatttctactaagtgtagatttttttnnnnnnnnnnaagcttggcgtggatccgatatcaactagatcttgagacaaatggcagtattcatccacaattttaaaagaaaaggggggattggggggtacagtgcaggggaaagaatagtagacataatagcaacagacatacaaactaaag

SEQ ID NO: 19199 - DNA, 301 bp, Artificial Sequence
  Rb1.2_NTC.31
  crRNA array
  misc_feature (148)..(157): n is a, c, g, or t
cttggctttatatatcttgtggaaaggacgaaacaccgtaatttctactaagtgtagatgtctctgcatgaaaacggagtaatttctactaagtgtagatgccgaccgcgtgattgtaggtaatttctactaagtgtagatttttttnnnnnnnnnnaagcttggcgtggatccgatatcaactagatcttgagacaaatggcagtattcatccacaattttaaaagaaaaggggggattggggggtacagtgcaggggaaagaatagtagacataatagcaacagacatacaaactaaag

SEQ ID NO: 19200 - DNA, 301 bp, Artificial Sequence
  Rb1.2_NTC.32
  crRNA array
  misc_feature (148)..(157): n is a, c, g, or t
cttggctttatatatcttgtggaaaggacgaaacaccgtaatttctactaagtgtagatgtctctgcatgaaaacggagtaatttctactaagtgtagatgcacgttacgcccgggtcactaatttctactaagtgtagatttttttnnnnnnnnnnaagcttggcgtggatccgatatcaactagatcttgagacaaatggcagtattcatccacaattttaaaagaaaaggggggattggggggtacagtgcaggggaaagaatagtagacataatagcaacagacatacaaactaaag

SEQ ID NO: 19201 - DNA, 301 bp, Artificial Sequence
  Rb1.2_NTC.33
  crRNA array
  misc_feature (148)..(157): n is a, c, g, or t
cttggctttatatatcttgtggaaaggacgaaacaccgtaatttctactaagtgtagatgtctctgcatgaaaacggagtaatttctactaagtgtagattaagcgaccgacgcattcgctaatttctactaagtgtagatttttttnnnnnnnnnnaagcttggcgtggatccgatatcaactagatcttgagacaaatggcagtattcatccacaattttaaaagaaaaggggggattggggggtacagtgcaggggaaagaatagtagacataatagcaacagacatacaaactaaag

SEQ ID NO: 19202 - DNA, 301 bp, Artificial Sequence
  Rb1.2_NTC.34
  crRNA array
  misc_feature (148)..(157): n is a, c, g, or t
cttggctttatatatcttgtggaaaggacgaaacaccgtaatttctactaagtgtagatgtctctgcatgaaaacggagtaatttctactaagtgtagattagcgttcgacacgtgaaactaatttctactaagtgtagatttttttnnnnnnnnnnaagcttggcgtggatccgatatcaactagatcttgagacaaatggcagtattcatccacaattttaaaagaaaaggggggattggggggtacagtgcaggggaaagaatagtagacataatagcaacagacatacaaactaaag

SEQ ID NO: 19203 - DNA, 301 bp, Artificial Sequence
  Rb1.2_NTC.35
  crRNA array
  misc_feature (148)..(157): n is a, c, g, or t
cttggctttatatatcttgtggaaaggacgaaacaccgtaatttctactaagtgtagatgtctctgcatgaaaacggagtaatttctactaagtgtagattggcgcgtaatcgctattcgtaatttctactaagtgtagatttttttnnnnnnnnnnaagcttggcgtggatccgatatcaactagatcttgagacaaatggcagtattcatccacaattttaaaagaaaaggggggattggggggtacagtgcaggggaaagaatagtagacataatagcaacagacatacaaactaaag

SEQ ID NO: 19204 - DNA, 301 bp, Artificial Sequence
  Rb1.2_NTC.36
  crRNA array
  misc_feature (148)..(157): n is a, c, g, or t
cttggctttatatatcttgtggaaaggacgaaacaccgtaatttctactaagtgtagatgtctctgcatgaaaacggagtaatttctactaagtgtagatcaacccgccgtagcgggccttaatttctactaagtgtagatttttttnnnnnnnnnnaagcttggcgtggatccgatatcaactagatcttgagacaaatggcagtattcatccacaattttaaaagaaaaggggggattggggggtacagtgcaggggaaagaatagtagacataatagcaacagacatacaaactaaag

SEQ ID NO: 19205 - DNA, 301 bp, Artificial Sequence
  Rb1.2_NTC.37
  crRNA array
  misc_feature (148)..(157): n is a, c, g, or t
cttggctttatatatcttgtggaaaggacgaaacaccgtaatttctactaagtgtagatgtctctgcatgaaaacggagtaatttctactaagtgtagattttgcgttgacgcgattacttaatttctactaagtgtagatttttttnnnnnnnnnnaagcttggcgtggatccgatatcaactagatcttgagacaaatggcagtattcatccacaattttaaaagaaaaggggggattggggggtacagtgcaggggaaagaatagtagacataatagcaacagacatacaaactaaag

SEQ ID NO: 19206 - DNA, 301 bp, Artificial Sequence
  Rb1.2_NTC.38
  crRNA array
  misc_feature (148)..(157): n is a, c, g, or t
cttggctttatatatcttgtggaaaggacgaaacaccgtaatttctactaagtgtagatgtctctgcatgaaaacggagtaatttctactaagtgtagataacggagcgcgatactaccataatttctactaagtgtagatttttttnnnnnnnnnnaagcttggcgtggatccgatatcaactagatcttgagacaaatggcagtattcatccacaattttaaaagaaaaggggggattggggggtacagtgcaggggaaagaatagtagacataatagcaacagacatacaaactaaag

SEQ ID NO: 19207 - DNA, 301 bp, Artificial Sequence
  Rb1.2_NTC.39
  crRNA array
  misc_feature (148)..(157): n is a, c, g, or t
cttggctttatatatcttgtggaaaggacgaaacaccgtaatttctactaagtgtagatgtctctgcatgaaaacggagtaatttctactaagtgtagatccggacgttataacgtttcttaatttctactaagtgtagatttttttnnnnnnnnnnaagcttggcgtggatccgatatcaactagatcttgagacaaatggcagtattcatccacaattttaaaagaaaaggggggattggggggtacagtgcaggggaaagaatagtagacataatagcaacagacatacaaactaaag

SEQ ID NO: 19208 - DNA, 301 bp, Artificial Sequence
  Rb1.2_NTC.4
  crRNA array
  misc_feature (148)..(157): n is a, c, g, or t
cttggctttatatatcttgtggaaaggacgaaacaccgtaatttctactaagtgtagatgtctctgcatgaaaacggagtaatttctactaagtgtagatatacccgtcgcgaacgtgagtaatttctactaagtgtagatttttttnnnnnnnnnnaagcttggcgtggatccgatatcaactagatcttgagacaaatggcagtattcatccacaattttaaaagaaaaggggggattggggggtacagtgcaggggaaagaatagtagacataatagcaacagacatacaaactaaag

SEQ ID NO: 19209 - DNA, 301 bp, Artificial Sequence
  Rb1.2_NTC.40
  crRNA array
  misc_feature (148)..(157): n is a, c, g, or t
cttggctttatatatcttgtggaaaggacgaaacaccgtaatttctactaagtgtagatgtctctgcatgaaaacggagtaatttctactaagtgtagatattcgcgaacccggccggaataatttctactaagtgtagatttttttnnnnnnnnnnaagcttggcgtggatccgatatcaactagatcttgagacaaatggcagtattcatccacaattttaaaagaaaaggggggattggggggtacagtgcaggggaaagaatagtagacataatagcaacagacatacaaactaaag

SEQ ID NO: 19210 - DNA, 301 bp, Artificial Sequence
  Rb1.2_NTC.41
  crRNA array
  misc_feature (148)..(157): n is a, c, g, or t
cttggctttatatatcttgtggaaaggacgaaacaccgtaatttctactaagtgtagatgtctctgcatgaaaacggagtaatttctactaagtgtagatttgatggcgcgacgcgttattaatttctactaagtgtagatttttttnnnnnnnnnnaagcttggcgtggatccgatatcaactagatcttgagacaaatggcagtattcatccacaattttaaaagaaaaggggggattggggggtacagtgcaggggaaagaatagtagacataatagcaacagacatacaaactaaag

SEQ ID NO: 19211 - DNA, 301 bp, Artificial Sequence
  Rb1.2_NTC.42
  crRNA array
  misc_feature (148)..(157): n is a, c, g, or t
cttggctttatatatcttgtggaaaggacgaaacaccgtaatttctactaagtgtagatgtctctgcatgaaaacggagtaatttctactaagtgtagatggtcaaatcgcggcgataactaatttctactaagtgtagatttttttnnnnnnnnnnaagcttggcgtggatccgatatcaactagatcttgagacaaatggcagtattcatccacaattttaaaagaaaaggggggattggggggtacagtgcaggggaaagaatagtagacataatagcaacagacatacaaactaaag

SEQ ID NO: 19212 - DNA, 301 bp, Artificial Sequence
  Rb1.2_NTC.43
  crRNA array
  misc_feature (148)..(157): n is a, c, g, or t
cttggctttatatatcttgtggaaaggacgaaacaccgtaatttctactaagtgtagatgtctctgcatgaaaacggagtaatttctactaagtgtagatcgactcgcgcattgaactggtaatttctactaagtgtagatttttttnnnnnnnnnnaagcttggcgtggatccgatatcaactagatcttgagacaaatggcagtattcatccacaattttaaaagaaaaggggggattggggggtacagtgcaggggaaagaatagtagacataatagcaacagacatacaaactaaag

SEQ ID NO: 19213 - DNA, 301 bp, Artificial Sequence
  Rb1.2_NTC.44
  crRNA array
  misc_feature (148)..(157): n is a, c, g, or t
cttggctttatatatcttgtggaaaggacgaaacaccgtaatttctactaagtgtagatgtctctgcatgaaaacggagtaatttctactaagtgtagatagcgtcgtacgatttatcgttaatttctactaagtgtagatttttttnnnnnnnnnnaagcttggcgtggatccgatatcaactagatcttgagacaaatggcagtattcatccacaattttaaaagaaaaggggggattggggggtacagtgcaggggaaagaatagtagacataatagcaacagacatacaaactaaag

SEQ ID NO: 19214 - DNA, 301 bp, Artificial Sequence
  Rb1.2_NTC.45
  crRNA array
  misc_feature (148)..(157): n is a, c, g, or t
cttggctttatatatcttgtggaaaggacgaaacaccgtaatttctactaagtgtagatgtctctgcatgaaaacggagtaatttctactaagtgtagatcggaacgcgtgatactagggtaatttctactaagtgtagatttttttnnnnnnnnnnaagcttggcgtggatccgatatcaactagatcttgagacaaatggcagtattcatccacaattttaaaagaaaaggggggattggggggtacagtgcaggggaaagaatagtagacataatagcaacagacatacaaactaaag

SEQ ID NO: 19215 - DNA, 301 bp, Artificial Sequence
  Rb1.2_NTC.46
  crRNA array
  misc_feature (148)..(157): n is a, c, g, or t
cttggctttatatatcttgtggaaaggacgaaacaccgtaatttctactaagtgtagatgtctctgcatgaaaacggagtaatttctactaagtgtagatagcgggtcgtagacgcgcggtaatttctactaagtgtagatttttttnnnnnnnnnnaagcttggcgtggatccgatatcaactagatcttgagacaaatggcagtattcatccacaattttaaaagaaaaggggggattggggggtacagtgcaggggaaagaatagtagacataatagcaacagacatacaaactaaag

SEQ ID NO: 19216 - DNA, 301 bp, Artificial Sequence
  Rb1.2_NTC.47
  crRNA array
  misc_feature (148)..(157): n is a, c, g, or t
cttggctttatatatcttgtggaaaggacgaaacaccgtaatttctactaagtgtagatgtctctgcatgaaaacggagtaatttctactaagtgtagattctcgtatcgcgattgttaataatttctactaagtgtagatttttttnnnnnnnnnnaagcttggcgtggatccgatatcaactagatcttgagacaaatggcagtattcatccacaattttaaaagaaaaggggggattggggggtacagtgcaggggaaagaatagtagacataatagcaacagacatacaaactaaag

SEQ ID NO: 19217 - DNA, 301 bp, Artificial Sequence
  Rb1.2_NTC.48
  crRNA array
  misc_feature (148)..(157): n is a, c, g, or t
cttggctttatatatcttgtggaaaggacgaaacaccgtaatttctactaagtgtagatgtctctgcatgaaaacggagtaatttctactaagtgtagatcggtcgactacggctgttagtaatttctactaagtgtagatttttttnnnnnnnnnnaagcttggcgtggatccgatatcaactagatcttgagacaaatggcagtattcatccacaattttaaaagaaaaggggggattggggggtacagtgcaggggaaagaatagtagacataatagcaacagacatacaaactaaag

SEQ ID NO: 19218 - DNA, 301 bp, Artificial Sequence
  Rb1.2_NTC.49
  crRNA array
  misc_feature (148)..(157): n is a, c, g, or t
cttggctttatatatcttgtggaaaggacgaaacaccgtaatttctactaagtgtagatgtctctgcatgaaaacggagtaatttctactaagtgtagattcggggcgcgtcaactgaattaatttctactaagtgtagatttttttnnnnnnnnnnaagcttggcgtggatccgatatcaactagatcttgagacaaatggcagtattcatccacaattttaaaagaaaaggggggattggggggtacagtgcaggggaaagaatagtagacataatagcaacagacatacaaactaaag

SEQ ID NO: 19219 - DNA, 301 bp, Artificial Sequence
  Rb1.2_NTC.5
  crRNA array
  misc_feature (148)..(157): n is a, c, g, or t
cttggctttatatatcttgtggaaaggacgaaacaccgtaatttctactaagtgtagatgtctctgcatgaaaacggagtaatttctactaagtgtagatgcttacgcgtcgcgaatgtataatttctactaagtgtagatttttttnnnnnnnnnnaagcttggcgtggatccgatatcaactagatcttgagacaaatggcagtattcatccacaattttaaaagaaaaggggggattggggggtacagtgcaggggaaagaatagtagacataatagcaacagacatacaaactaaag

SEQ ID NO: 19220 - DNA, 301 bp, Artificial Sequence
  Rb1.2_NTC.50
  crRNA array
  misc_feature (148)..(157): n is a, c, g, or t
cttggctttatatatcttgtggaaaggacgaaacaccgtaatttctactaagtgtagatgtctctgcatgaaaacggagtaatttctactaagtgtagatattgccgctcgcgcaaaatctaatttctactaagtgtagatttttttnnnnnnnnnnaagcttggcgtggatccgatatcaactagatcttgagacaaatggcagtattcatccacaattttaaaagaaaaggggggattggggggtacagtgcaggggaaagaatagtagacataatagcaacagacatacaaactaaag

SEQ ID NO: 19221 - DNA, 301 bp, Artificial Sequence
  Rb1.2_NTC.51
  crRNA array
  misc_feature (148)..(157): n is a, c, g, or t
cttggctttatatatcttgtggaaaggacgaaacaccgtaatttctactaagtgtagatgtctctgcatgaaaacggagtaatttctactaagtgtagattaacgcgcaacacgccaatgtaatttctactaagtgtagatttttttnnnnnnnnnnaagcttggcgtggatccgatatcaactagatcttgagacaaatggcagtattcatccacaattttaaaagaaaaggggggattggggggtacagtgcaggggaaagaatagtagacataatagcaacagacatacaaactaaag

SEQ ID NO: 19222 - DNA, 301 bp, Artificial Sequence
  Rb1.2_NTC.6
  crRNA array
  misc_feature (148)..(157): n is a, c, g, or t
cttggctttatatatcttgtggaaaggacgaaacaccgtaatttctactaagtgtagatgtctctgcatgaaaacggagtaatttctactaagtgtagatcgaatcgcgcctacgggaattaatttctactaagtgtagatttttttnnnnnnnnnnaagcttggcgtggatccgatatcaactagatcttgagacaaatggcagtattcatccacaattttaaaagaaaaggggggattggggggtacagtgcaggggaaagaatagtagacataatagcaacagacatacaaactaaag

SEQ ID NO: 19223 - DNA, 301 bp, Artificial Sequence
  Rb1.2_NTC.7
  crRNA array
  misc_feature (148)..(157): n is a, c, g, or t
cttggctttatatatcttgtggaaaggacgaaacaccgtaatttctactaagtgtagatgtctctgcatgaaaacggagtaatttctactaagtgtagatcgccgaacggataagactattaatttctactaagtgtagatttttttnnnnnnnnnnaagcttggcgtggatccgatatcaactagatcttgagacaaatggcagtattcatccacaattttaaaagaaaaggggggattggggggtacagtgcaggggaaagaatagtagacataatagcaacagacatacaaactaaag

SEQ ID NO: 19224 - DNA, 301 bp, Artificial Sequence
  Rb1.2_NTC.8
  crRNA array
  misc_feature (148)..(157): n is a, c, g, or t
cttggctttatatatcttgtggaaaggacgaaacaccgtaatttctactaagtgtagatgtctctgcatgaaaacggagtaatttctactaagtgtagatcgaccgaggttacgctgggataatttctactaagtgtagatttttttnnnnnnnnnnaagcttggcgtggatccgatatcaactagatcttgagacaaatggcagtattcatccacaattttaaaagaaaaggggggattggggggtacagtgcaggggaaagaatagtagacataatagcaacagacatacaaactaaag

SEQ ID NO: 19225 - DNA, 301 bp, Artificial Sequence
  Rb1.2_NTC.9
  crRNA array
  misc_feature (148)..(157): n is a, c, g, or t
cttggctttatatatcttgtggaaaggacgaaacaccgtaatttctactaagtgtagatgtctctgcatgaaaacggagtaatttctactaagtgtagatatcgccgtacggctatggcataatttctactaagtgtagatttttttnnnnnnnnnnaagcttggcgtggatccgatatcaactagatcttgagacaaatggcagtattcatccacaattttaaaagaaaaggggggattggggggtacagtgcaggggaaagaatagtagacataatagcaacagacatacaaactaaag

SEQ ID NO: 19226 - DNA, 301 bp, Artificial Sequence
  Rb1.3_NTC.0
  crRNA array
  misc_feature (148)..(157): n is a, c, g, or t
cttggctttatatatcttgtggaaaggacgaaacaccgtaatttctactaagtgtagatagccaatctggtctaataactaatttctactaagtgtagattatagcgtcgcgcgctaatttaatttctactaagtgtagatttttttnnnnnnnnnnaagcttggcgtggatccgatatcaactagatcttgagacaaatggcagtattcatccacaattttaaaagaaaaggggggattggggggtacagtgcaggggaaagaatagtagacataatagcaacagacatacaaactaaag

SEQ ID NO: 19227 - DNA, 301 bp, Artificial Sequence
  Rb1.3_NTC.1
  crRNA array
  misc_feature (148)..(157): n is a, c, g, or t
cttggctttatatatcttgtggaaaggacgaaacaccgtaatttctactaagtgtagatagccaatctggtctaataactaatttctactaagtgtagatcgcgtaaccgttccggctcctaatttctactaagtgtagatttttttnnnnnnnnnnaagcttggcgtggatccgatatcaactagatcttgagacaaatggcagtattcatccacaattttaaaagaaaaggggggattggggggtacagtgcaggggaaagaatagtagacataatagcaacagacatacaaactaaag

SEQ ID NO: 19228 - DNA, 301 bp, Artificial Sequence
  Rb1.3_NTC.10
  crRNA array
  misc_feature (148)..(157): n is a, c, g, or t
cttggctttatatatcttgtggaaaggacgaaacaccgtaatttctactaagtgtagatagccaatctggtctaataactaatttctactaagtgtagatcgctaagttcgcgcgggccgtaatttctactaagtgtagatttttttnnnnnnnnnnaagcttggcgtggatccgatatcaactagatcttgagacaaatggcagtattcatccacaattttaaaagaaaaggggggattggggggtacagtgcaggggaaagaatagtagacataatagcaacagacatacaaactaaag

SEQ ID NO: 19229 - DNA, 301 bp, Artificial Sequence
  Rb1.3_NTC.11
  crRNA array
  misc_feature (148)..(157): n is a, c, g, or t
cttggctttatatatcttgtggaaaggacgaaacaccgtaatttctactaagtgtagatagccaatctggtctaataactaatttctactaagtgtagatcgttcgtcgacgaagcaatctaatttctactaagtgtagatttttttnnnnnnnnnnaagcttggcgtggatccgatatcaactagatcttgagacaaatggcagtattcatccacaattttaaaagaaaaggggggattggggggtacagtgcaggggaaagaatagtagacataatagcaacagacatacaaactaaag

SEQ ID NO: 19230 - DNA, 301 bp, Artificial Sequence
  Rb1.3_NTC.12
  crRNA array
  misc_feature (148)..(157): n is a, c, g, or t
cttggctttatatatcttgtggaaaggacgaaacaccgtaatttctactaagtgtagatagccaatctggtctaataactaatttctactaagtgtagatcgccgacgattaatcaatagtaatttctactaagtgtagatttttttnnnnnnnnnnaagcttggcgtggatccgatatcaactagatcttgagacaaatggcagtattcatccacaattttaaaagaaaaggggggattggggggtacagtgcaggggaaagaatagtagacataatagcaacagacatacaaactaaag

SEQ ID NO: 19231 - DNA, 301 bp, Artificial Sequence
  Rb1.3_NTC.13
  crRNA array
  misc_feature (148)..(157): n is a, c, g, or t
cttggctttatatatcttgtggaaaggacgaaacaccgtaatttctactaagtgtagatagccaatctggtctaataactaatttctactaagtgtagatgaccgttgtatcgcgatcaataatttctactaagtgtagatttttttnnnnnnnnnnaagcttggcgtggatccgatatcaactagatcttgagacaaatggcagtattcatccacaattttaaaagaaaaggggggattggggggtacagtgcaggggaaagaatagtagacataatagcaacagacatacaaactaaag

SEQ ID NO: 19232 - DNA, 301 bp, Artificial Sequence
  Rb1.3_NTC.14
  crRNA array
  misc_feature (148)..(157): n is a, c, g, or t
cttggctttatatatcttgtggaaaggacgaaacaccgtaatttctactaagtgtagatagccaatctggtctaataactaatttctactaagtgtagatccgttcgtgcgatagtgttttaatttctactaagtgtagatttttttnnnnnnnnnnaagcttggcgtggatccgatatcaactagatcttgagacaaatggcagtattcatccacaattttaaaagaaaaggggggattggggggtacagtgcaggggaaagaatagtagacataatagcaacagacatacaaactaaag

SEQ ID NO: 19233 - DNA, 301 bp, Artificial Sequence
  Rb1.3_NTC.15
  crRNA array
  misc_feature (148)..(157): n is a, c, g, or t
cttggctttatatatcttgtggaaaggacgaaacaccgtaatttctactaagtgtagatagccaatctggtctaataactaatttctactaagtgtagatgttgtcgtgccgcgaatttataatttctactaagtgtagatttttttnnnnnnnnnnaagcttggcgtggatccgatatcaactagatcttgagacaaatggcagtattcatccacaattttaaaagaaaaggggggattggggggtacagtgcaggggaaagaatagtagacataatagcaacagacatacaaactaaag

SEQ ID NO: 19234 - DNA, 301 bp, Artificial Sequence
  Rb1.3_NTC.16
  crRNA array
  misc_feature (148)..(157): n is a, c, g, or t
cttggctttatatatcttgtggaaaggacgaaacaccgtaatttctactaagtgtagatagccaatctggtctaataactaatttctactaagtgtagatcggtacgttagacgaaaatttaatttctactaagtgtagatttttttnnnnnnnnnnaagcttggcgtggatccgatatcaactagatcttgagacaaatggcagtattcatccacaattttaaaagaaaaggggggattggggggtacagtgcaggggaaagaatagtagacataatagcaacagacatacaaactaaag

SEQ ID NO: 19235 - DNA, 301 bp, Artificial Sequence
  Rb1.3_NTC.17
  crRNA array
  misc_feature (148)..(157): n is a, c, g, or t
cttggctttatatatcttgtggaaaggacgaaacaccgtaatttctactaagtgtagatagccaatctggtctaataactaatttctactaagtgtagattatcgaacgctatcgaacgttaatttctactaagtgtagatttttttnnnnnnnnnnaagcttggcgtggatccgatatcaactagatcttgagacaaatggcagtattcatccacaattttaaaagaaaaggggggattggggggtacagtgcaggggaaagaatagtagacataatagcaacagacatacaaactaaag

SEQ ID NO: 19236 - DNA, 301 bp, Artificial Sequence
  Rb1.3_NTC.18
  crRNA array
  misc_feature (148)..(157): n is a, c, g, or t
cttggctttatatatcttgtggaaaggacgaaacaccgtaatttctactaagtgtagatagccaatctggtctaataactaatttctactaagtgtagattccggttacgaccggcaaaataatttctactaagtgtagatttttttnnnnnnnnnnaagcttggcgtggatccgatatcaactagatcttgagacaaatggcagtattcatccacaattttaaaagaaaaggggggattggggggtacagtgcaggggaaagaatagtagacataatagcaacagacatacaaactaaag

SEQ ID NO: 19237 - DNA, 301 bp, Artificial Sequence
  Rb1.3_NTC.19
  crRNA array
  misc_feature (148)..(157): n is a, c, g, or t
cttggctttatatatcttgtggaaaggacgaaacaccgtaatttctactaagtgtagatagccaatctggtctaataactaatttctactaagtgtagatcgtcgtagaacgatacccgataatttctactaagtgtagatttttttnnnnnnnnnnaagcttggcgtggatccgatatcaactagatcttgagacaaatggcagtattcatccacaattttaaaagaaaaggggggattggggggtacagtgcaggggaaagaatagtagacataatagcaacagacatacaaactaaag

SEQ ID NO: 19238 - DNA, 301 bp, Artificial Sequence
  Rb1.3_NTC.2
  crRNA array
  misc_feature (148)..(157): n is a, c, g, or t
cttggctttatatatcttgtggaaaggacgaaacaccgtaatttctactaagtgtagatagccaatctggtctaataactaatttctactaagtgtagatttatgtcgcgccgcgacccgtaatttctactaagtgtagatttttttnnnnnnnnnnaagcttggcgtggatccgatatcaactagatcttgagacaaatggcagtattcatccacaattttaaaagaaaaggggggattggggggtacagtgcaggggaaagaatagtagacataatagcaacagacatacaaactaaag

SEQ ID NO: 19239 - DNA, 301 bp, Artificial Sequence
  Rb1.3_NTC.20
  crRNA array
  misc_feature (148)..(157): n is a, c, g, or t
cttggctttatatatcttgtggaaaggacgaaacaccgtaatttctactaagtgtagatagccaatctggtctaataactaatttctactaagtgtagatattccggcgcgaccagaagataatttctactaagtgtagatttttttnnnnnnnnnnaagcttggcgtggatccgatatcaactagatcttgagacaaatggcagtattcatccacaattttaaaagaaaaggggggattggggggtacagtgcaggggaaagaatagtagacataatagcaacagacatacaaactaaag

SEQ ID NO: 19240 - DNA, 301 bp, Artificial Sequence
  Rb1.3_NTC.21
  crRNA array
  misc_feature (148)..(157): n is a, c, g, or t
cttggctttatatatcttgtggaaaggacgaaacaccgtaatttctactaagtgtagatagccaatctggtctaataactaatttctactaagtgtagatgtataacttcgcgcggtccgtaatttctactaagtgtagatttttttnnnnnnnnnnaagcttggcgtggatccgatatcaactagatcttgagacaaatggcagtattcatccacaattttaaaagaaaaggggggattggggggtacagtgcaggggaaagaatagtagacataatagcaacagacatacaaactaaag

SEQ ID NO: 19241 - DNA, 301 bp, Artificial Sequence
  Rb1.3_NTC.22
  crRNA array
  misc_feature (148)..(157): n is a, c, g, or t
cttggctttatatatcttgtggaaaggacgaaacaccgtaatttctactaagtgtagatagccaatctggtctaataactaatttctactaagtgtagatgcgcgtcaacgtaatgtgcctaatttctactaagtgtagatttttttnnnnnnnnnnaagcttggcgtggatccgatatcaactagatcttgagacaaatggcagtattcatccacaattttaaaagaaaaggggggattggggggtacagtgcaggggaaagaatagtagacataatagcaacagacatacaaactaaag

SEQ ID NO: 19242 - DNA, 301 bp, Artificial Sequence
  Rb1.3_NTC.23
  crRNA array
  misc_feature (148)..(157): n is a, c, g, or t
cttggctttatatatcttgtggaaaggacgaaacaccgtaatttctactaagtgtagatagccaatctggtctaataactaatttctactaagtgtagatacgcgctattatcgtaggtgtaatttctactaagtgtagatttttttnnnnnnnnnnaagcttggcgtggatccgatatcaactagatcttgagacaaatggcagtattcatccacaattttaaaagaaaaggggggattggggggtacagtgcaggggaaagaatagtagacataatagcaacagacatacaaactaaag

SEQ ID NO: 19243 - DNA, 301 bp, Artificial Sequence
  Rb1.3_NTC.24
  crRNA array
  misc_feature (148)..(157): n is a, c, g, or t
cttggctttatatatcttgtggaaaggacgaaacaccgtaatttctactaagtgtagatagccaatctggtctaataactaatttctactaagtgtagatactatcgacgttcgtcccggtaatttctactaagtgtagatttttttnnnnnnnnnnaagcttggcgtggatccgatatcaactagatcttgagacaaatggcagtattcatccacaattttaaaagaaaaggggggattggggggtacagtgcaggggaaagaatagtagacataatagcaacagacatacaaactaaag

SEQ ID NO: 19244 - DNA, 301 bp, Artificial Sequence
  Rb1.3_NTC.25
  crRNA array
  misc_feature (148)..(157): n is a, c, g, or t
cttggctttatatatcttgtggaaaggacgaaacaccgtaatttctactaagtgtagatagccaatctggtctaataactaatttctactaagtgtagattcgcgttatcgtgccgtgcgtaatttctactaagtgtagatttttttnnnnnnnnnnaagcttggcgtggatccgatatcaactagatcttgagacaaatggcagtattcatccacaattttaaaagaaaaggggggattggggggtacagtgcaggggaaagaatagtagacataatagcaacagacatacaaactaaag

SEQ ID NO: 19245 - DNA, 301 bp, Artificial Sequence
  Rb1.3_NTC.26
  crRNA array
  misc_feature (148)..(157): n is a, c, g, or t
cttggctttatatatcttgtggaaaggacgaaacaccgtaatttctactaagtgtagatagccaatctggtctaataactaatttctactaagtgtagatcgcgacggcggttttaacactaatttctactaagtgtagatttttttnnnnnnnnnnaagcttggcgtggatccgatatcaactagatcttgagacaaatggcagtattcatccacaattttaaaagaaaaggggggattggggggtacagtgcaggggaaagaatagtagacataatagcaacagacatacaaactaaag

SEQ ID NO: 19246 - DNA, 301 bp, Artificial Sequence
  Rb1.3_NTC.27
  crRNA array
  misc_feature (148)..(157): n is a, c, g, or t
cttggctttatatatcttgtggaaaggacgaaacaccgtaatttctactaagtgtagatagccaatctggtctaataactaatttctactaagtgtagatgtcgcgttgcgaccggcgcttaatttctactaagtgtagatttttttnnnnnnnnnnaagcttggcgtggatccgatatcaactagatcttgagacaaatggcagtattcatccacaattttaaaagaaaaggggggattggggggtacagtgcaggggaaagaatagtagacataatagcaacagacatacaaactaaag

SEQ ID NO: 19247 - DNA, 301 bp, Artificial Sequence
  Rb1.3_NTC.28
  crRNA array
  misc_feature (148)..(157): n is a, c, g, or t
cttggctttatatatcttgtggaaaggacgaaacaccgtaatttctactaagtgtagatagccaatctggtctaataactaatttctactaagtgtagataccgctaatcggcgtaaacttaatttctactaagtgtagatttttttnnnnnnnnnnaagcttggcgtggatccgatatcaactagatcttgagacaaatggcagtattcatccacaattttaaaagaaaaggggggattggggggtacagtgcaggggaaagaatagtagacataatagcaacagacatacaaactaaag

SEQ ID NO: 19248 - DNA, 301 bp, Artificial Sequence
  Rb1.3_NTC.29
  crRNA array
  misc_feature (148)..(157): n is a, c, g, or t
cttggctttatatatcttgtggaaaggacgaaacaccgtaatttctactaagtgtagatagccaatctggtctaataactaatttctactaagtgtagatcgcgatctataccgtctatataatttctactaagtgtagatttttttnnnnnnnnnnaagcttggcgtggatccgatatcaactagatcttgagacaaatggcagtattcatccacaattttaaaagaaaaggggggattggggggtacagtgcaggggaaagaatagtagacataatagcaacagacatacaaactaaag

SEQ ID NO: 19249 - DNA, 301 bp, Artificial Sequence
  Rb1.3_NTC.3
  crRNA array
  misc_feature (148)..(157): n is a, c, g, or t
cttggctttatatatcttgtggaaaggacgaaacaccgtaatttctactaagtgtagatagccaatctggtctaataactaatttctactaagtgtagattcgacgcgagacgacgtacataatttctactaagtgtagatttttttnnnnnnnnnnaagcttggcgtggatccgatatcaactagatcttgagacaaatggcagtattcatccacaattttaaaagaaaaggggggattggggggtacagtgcaggggaaagaatagtagacataatagcaacagacatacaaactaaag

SEQ ID NO: 19250 - DNA, 301 bp, Artificial Sequence
  Rb1.3_NTC.30
  crRNA array
  misc_feature (148)..(157): n is a, c, g, or t
cttggctttatatatcttgtggaaaggacgaaacaccgtaatttctactaagtgtagatagccaatctggtctaataactaatttctactaagtgtagatcgatcgtacgggtgtcctaataatttctactaagtgtagatttttttnnnnnnnnnnaagcttggcgtggatccgatatcaactagatcttgagacaaatggcagtattcatccacaattttaaaagaaaaggggggattggggggtacagtgcaggggaaagaatagtagacataatagcaacagacatacaaactaaag

SEQ ID NO: 19251 - DNA, 301 bp, Artificial Sequence
  Rb1.3_NTC.31
  crRNA array
  misc_feature (148)..(157): n is a, c, g, or t
cttggctttatatatcttgtggaaaggacgaaacaccgtaatttctactaagtgtagatagccaatctggtctaataactaatttctactaagtgtagatgccgaccgcgtgattgtaggtaatttctactaagtgtagatttttttnnnnnnnnnnaagcttggcgtggatccgatatcaactagatcttgagacaaatggcagtattcatccacaattttaaaagaaaaggggggattggggggtacagtgcaggggaaagaatagtagacataatagcaacagacatacaaactaaag

SEQ ID NO: 19252 - DNA, 301 bp, Artificial Sequence
  Rb1.3_NTC.32
  crRNA array
  misc_feature (148)..(157): n is a, c, g, or t
cttggctttatatatcttgtggaaaggacgaaacaccgtaatttctactaagtgtagatagccaatctggtctaataactaatttctactaagtgtagatgcacgttacgcccgggtcactaatttctactaagtgtagatttttttnnnnnnnnnnaagcttggcgtggatccgatatcaactagatcttgagacaaatggcagtattcatccacaattttaaaagaaaaggggggattggggggtacagtgcaggggaaagaatagtagacataatagcaacagacatacaaactaaag

SEQ ID NO: 19253 - DNA, 301 bp, Artificial Sequence
  Rb1.3_NTC.33
  crRNA array
  misc_feature (148)..(157): n is a, c, g, or t
cttggctttatatatcttgtggaaaggacgaaacaccgtaatttctactaagtgtagatagccaatctggtctaataactaatttctactaagtgtagattaagcgaccgacgcattcgctaatttctactaagtgtagatttttttnnnnnnnnnnaagcttggcgtggatccgatatcaactagatcttgagacaaatggcagtattcatccacaattttaaaagaaaaggggggattggggggtacagtgcaggggaaagaatagtagacataatagcaacagacatacaaactaaag

SEQ ID NO: 19254 - DNA, 301 bp, Artificial Sequence
  Rb1.3_NTC.34
  crRNA array
  misc_feature (148)..(157): n is a, c, g, or t
cttggctttatatatcttgtggaaaggacgaaacaccgtaatttctactaagtgtagatagccaatctggtctaataactaatttctactaagtgtagattagcgttcgacacgtgaaactaatttctactaagtgtagatttttttnnnnnnnnnnaagcttggcgtggatccgatatcaactagatcttgagacaaatggcagtattcatccacaattttaaaagaaaaggggggattggggggtacagtgcaggggaaagaatagtagacataatagcaacagacatacaaactaaag

SEQ ID NO: 19255 - DNA, 301 bp, Artificial Sequence
  Rb1.3_NTC.35
  crRNA array
  misc_feature (148)..(157): n is a, c, g, or t
cttggctttatatatcttgtggaaaggacgaaacaccgtaatttctactaagtgtagatagccaatctggtctaataactaatttctactaagtgtagattggcgcgtaatcgctattcgtaatttctactaagtgtagatttttttnnnnnnnnnnaagcttggcgtggatccgatatcaactagatcttgagacaaatggcagtattcatccacaattttaaaagaaaaggggggattggggggtacagtgcaggggaaagaatagtagacataatagcaacagacatacaaactaaag

SEQ ID NO: 19256 - DNA, 301 bp, Artificial Sequence
  Rb1.3_NTC.36
  crRNA array
  misc_feature (148)..(157): n is a, c, g, or t
cttggctttatatatcttgtggaaaggacgaaacaccgtaatttctactaagtgtagatagccaatctggtctaataactaatttctactaagtgtagatcaacccgccgtagcgggccttaatttctactaagtgtagatttttttnnnnnnnnnnaagcttggcgtggatccgatatcaactagatcttgagacaaatggcagtattcatccacaattttaaaagaaaaggggggattggggggtacagtgcaggggaaagaatagtagacataatagcaacagacatacaaactaaag

SEQ ID NO: 19257 - DNA, 301 bp, Artificial Sequence
  Rb1.3_NTC.37
  crRNA array
  misc_feature (148)..(157): n is a, c, g, or t
cttggctttatatatcttgtggaaaggacgaaacaccgtaatttctactaagtgtagatagccaatctggtctaataactaatttctactaagtgtagattttgcgttgacgcgattacttaatttctactaagtgtagatttttttnnnnnnnnnnaagcttggcgtggatccgatatcaactagatcttgagacaaatggcagtattcatccacaattttaaaagaaaaggggggattggggggtacagtgcaggggaaagaatagtagacataatagcaacagacatacaaactaaag

SEQ ID NO: 19258 - DNA, 301 bp, Artificial Sequence
  Rb1.3_NTC.38
  crRNA array
  misc_feature (148)..(157): n is a, c, g, or t
cttggctttatatatcttgtggaaaggacgaaacaccgtaatttctactaagtgtagatagccaatctggtctaataactaatttctactaagtgtagataacggagcgcgatactaccataatttctactaagtgtagatttttttnnnnnnnnnnaagcttggcgtggatccgatatcaactagatcttgagacaaatggcagtattcatccacaattttaaaagaaaaggggggattggggggtacagtgcaggggaaagaatagtagacataatagcaacagacatacaaactaaag

SEQ ID NO: 19259 - DNA, 301 bp, Artificial Sequence
  Rb1.3_NTC.39
  crRNA array
  misc_feature (148)..(157): n is a, c, g, or t
cttggctttatatatcttgtggaaaggacgaaacaccgtaatttctactaagtgtagatagccaatctggtctaataactaatttctactaagtgtagatccggacgttataacgtttcttaatttctactaagtgtagatttttttnnnnnnnnnnaagcttggcgtggatccgatatcaactagatcttgagacaaatggcagtattcatccacaattttaaaagaaaaggggggattggggggtacagtgcaggggaaagaatagtagacataatagcaacagacatacaaactaaag

SEQ ID NO: 19260 - DNA, 301 bp, Artificial Sequence
  Rb1.3_NTC.4
  crRNA array
  misc_feature (148)..(157): n is a, c, g, or t
cttggctttatatatcttgtggaaaggacgaaacaccgtaatttctactaagtgtagatagccaatctggtctaataactaatttctactaagtgtagatatacccgtcgcgaacgtgagtaatttctactaagtgtagatttttttnnnnnnnnnnaagcttggcgtggatccgatatcaactagatcttgagacaaatggcagtattcatccacaattttaaaagaaaaggggggattggggggtacagtgcaggggaaagaatagtagacataatagcaacagacatacaaactaaag

SEQ ID NO: 19261 - DNA, 301 bp, Artificial Sequence
  Rb1.3_NTC.40
  crRNA array
  misc_feature (148)..(157): n is a, c, g, or t
cttggctttatatatcttgtggaaaggacgaaacaccgtaatttctactaagtgtagatagccaatctggtctaataactaatttctactaagtgtagatattcgcgaacccggccggaataatttctactaagtgtagatttttttnnnnnnnnnnaagcttggcgtggatccgatatcaactagatcttgagacaaatggcagtattcatccacaattttaaaagaaaaggggggattggggggtacagtgcaggggaaagaatagtagacataatagcaacagacatacaaactaaag

SEQ ID NO: 19262 - DNA, 301 bp, Artificial Sequence
  Rb1.3_NTC.41
  crRNA array
  misc_feature (148)..(157): n is a, c, g, or t
cttggctttatatatcttgtggaaaggacgaaacaccgtaatttctactaagtgtagatagccaatctggtctaataactaatttctactaagtgtagatttgatggcgcgacgcgttattaatttctactaagtgtagatttttttnnnnnnnnnnaagcttggcgtggatccgatatcaactagatcttgagacaaatggcagtattcatccacaattttaaaagaaaaggggggattggggggtacagtgcaggggaaagaatagtagacataatagcaacagacatacaaactaaag

SEQ ID NO: 19263 - DNA, 301 bp, Artificial Sequence
  Rb1.3_NTC.42
  crRNA array
  misc_feature (148)..(157): n is a, c, g, or t
cttggctttatatatcttgtggaaaggacgaaacaccgtaatttctactaagtgtagatagccaatctggtctaataactaatttctactaagtgtagatggtcaaatcgcggcgataactaatttctactaagtgtagatttttttnnnnnnnnnnaagcttggcgtggatccgatatcaactagatcttgagacaaatggcagtattcatccacaattttaaaagaaaaggggggattggggggtacagtgcaggggaaagaatagtagacataatagcaacagacatacaaactaaag

SEQ ID NO: 19264 - DNA, 301 bp, Artificial Sequence
  Rb1.3_NTC.43
  crRNA array
  misc_feature (148)..(157): n is a, c, g, or t
cttggctttatatatcttgtggaaaggacgaaacaccgtaatttctactaagtgtagatagccaatctggtctaataactaatttctactaagtgtagatcgactcgcgcattgaactggtaatttctactaagtgtagatttttttnnnnnnnnnnaagcttggcgtggatccgatatcaactagatcttgagacaaatggcagtattcatccacaattttaaaagaaaaggggggattggggggtacagtgcaggggaaagaatagtagacataatagcaacagacatacaaactaaag

SEQ ID NO: 19265 - DNA, 301 bp, Artificial Sequence
  Rb1.3_NTC.44
  crRNA array
  misc_feature (148)..(157): n is a, c, g, or t
cttggctttatatatcttgtggaaaggacgaaacaccgtaatttctactaagtgtagatagccaatctggtctaataactaatttctactaagtgtagatagcgtcgtacgatttatcgttaatttctactaagtgtagatttttttnnnnnnnnnnaagcttggcgtggatccgatatcaactagatcttgagacaaatggcagtattcatccacaattttaaaagaaaaggggggattggggggtacagtgcaggggaaagaatagtagacataatagcaacagacatacaaactaaag

SEQ ID NO: 19266 - DNA, 301 bp, Artificial Sequence
  Rb1.3_NTC.45
  crRNA array
  misc_feature (148)..(157): n is a, c, g, or t
cttggctttatatatcttgtggaaaggacgaaacaccgtaatttctactaagtgtagatagccaatctggtctaataactaatttctactaagtgtagatcggaacgcgtgatactagggtaatttctactaagtgtagatttttttnnnnnnnnnnaagcttggcgtggatccgatatcaactagatcttgagacaaatggcagtattcatccacaattttaaaagaaaaggggggattggggggtacagtgcaggggaaagaatagtagacataatagcaacagacatacaaactaaag

SEQ ID NO: 19267 - DNA, 301 bp, Artificial Sequence
  Rb1.3_NTC.46
  crRNA array
  misc_feature (148)..(157): n is a, c, g, or t
cttggctttatatatcttgtggaaaggacgaaacaccgtaatttctactaagtgtagatagccaatctggtctaataactaatttctactaagtgtagatagcgggtcgtagacgcgcggtaatttctactaagtgtagatttttttnnnnnnnnnnaagcttggcgtggatccgatatcaactagatcttgagacaaatggcagtattcatccacaattttaaaagaaaaggggggattggggggtacagtgcaggggaaagaatagtagacataatagcaacagacatacaaactaaag

SEQ ID NO: 19268 - DNA, 301 bp, Artificial Sequence
  Rb1.3_NTC.47
  crRNA array
  misc_feature (148)..(157): n is a, c, g, or t
cttggctttatatatcttgtggaaaggacgaaacaccgtaatttctactaagtgtagatagccaatctggtctaataactaatttctactaagtgtagattctcgtatcgcgattgttaataatttctactaagtgtagatttttttnnnnnnnnnnaagcttggcgtggatccgatatcaactagatcttgagacaaatggcagtattcatccacaattttaaaagaaaaggggggattggggggtacagtgcaggggaaagaatagtagacataatagcaacagacatacaaactaaag

SEQ ID NO: 19269 - DNA, 301 bp, Artificial Sequence
  Rb1.3_NTC.48
  crRNA array
  misc_feature (148)..(157): n is a, c, g, or t
cttggctttatatatcttgtggaaaggacgaaacaccgtaatttctactaagtgtagatagccaatctggtctaataactaatttctactaagtgtagatcggtcgactacggctgttagtaatttctactaagtgtagatttttttnnnnnnnnnnaagcttggcgtggatccgatatcaactagatcttgagacaaatggcagtattcatccacaattttaaaagaaaaggggggattggggggtacagtgcaggggaaagaatagtagacataatagcaacagacatacaaactaaag

SEQ ID NO: 19270 - DNA, 301 bp, Artificial Sequence
  Rb1.3_NTC.49
  crRNA array
  misc_feature (148)..(157): n is a, c, g, or t
cttggctttatatatcttgtggaaaggacgaaacaccgtaatttctactaagtgtagatagccaatctggtctaataactaatttctactaagtgtagattcggggcgcgtcaactgaattaatttctactaagtgtagatttttttnnnnnnnnnnaagcttggcgtggatccgatatcaactagatcttgagacaaatggcagtattcatccacaattttaaaagaaaaggggggattggggggtacagtgcaggggaaagaatagtagacataatagcaacagacatacaaactaaag

SEQ ID NO: 19271 - DNA, 301 bp, Artificial Sequence
  Rb1.3_NTC.5
  crRNA array
  misc_feature (148)..(157): n is a, c, g, or t
cttggctttatatatcttgtggaaaggacgaaacaccgtaatttctactaagtgtagatagccaatctggtctaataactaatttctactaagtgtagatgcttacgcgtcgcgaatgtataatttctactaagtgtagatttttttnnnnnnnnnnaagcttggcgtggatccgatatcaactagatcttgagacaaatggcagtattcatccacaattttaaaagaaaaggggggattggggggtacagtgcaggggaaagaatagtagacataatagcaacagacatacaaactaaag

SEQ ID NO: 19272 - DNA, 301 bp, Artificial Sequence
  Rb1.3_NTC.50
  crRNA array
  misc_feature (148)..(157): n is a, c, g, or t
cttggctttatatatcttgtggaaaggacgaaacaccgtaatttctactaagtgtagatagccaatctggtctaataactaatttctactaagtgtagatattgccgctcgcgcaaaatctaatttctactaagtgtagatttttttnnnnnnnnnnaagcttggcgtggatccgatatcaactagatcttgagacaaatggcagtattcatccacaattttaaaagaaaaggggggattggggggtacagtgcaggggaaagaatagtagacataatagcaacagacatacaaactaaag

SEQ ID NO: 19273 - DNA, 301 bp, Artificial Sequence
  Rb1.3_NTC.51
  crRNA array
  misc_feature (148)..(157): n is a, c, g, or t
cttggctttatatatcttgtggaaaggacgaaacaccgtaatttctactaagtgtagatagccaatctggtctaataactaatttctactaagtgtagattaacgcgcaacacgccaatgtaatttctactaagtgtagatttttttnnnnnnnnnnaagcttggcgtggatccgatatcaactagatcttgagacaaatggcagtattcatccacaattttaaaagaaaaggggggattggggggtacagtgcaggggaaagaatagtagacataatagcaacagacatacaaactaaag

SEQ ID NO: 19274 - DNA, 301 bp, Artificial Sequence
  Rb1.3_NTC.6
  crRNA array
  misc_feature (148)..(157): n is a, c, g, or t
cttggctttatatatcttgtggaaaggacgaaacaccgtaatttctactaagtgtagatagccaatctggtctaataactaatttctactaagtgtagatcgaatcgcgcctacgggaattaatttctactaagtgtagatttttttnnnnnnnnnnaagcttggcgtggatccgatatcaactagatcttgagacaaatggcagtattcatccacaattttaaaagaaaaggggggattggggggtacagtgcaggggaaagaatagtagacataatagcaacagacatacaaactaaag

SEQ ID NO: 19275 - DNA, 301 bp, Artificial Sequence
  Rb1.3_NTC.7
  crRNA array
  misc_feature (148)..(157): n is a, c, g, or t
cttggctttatatatcttgtggaaaggacgaaacaccgtaatttctactaagtgtagatagccaatctggtctaataactaatttctactaagtgtagatcgccgaacggataagactattaatttctactaagtgtagatttttttnnnnnnnnnnaagcttggcgtggatccgatatcaactagatcttgagacaaatggcagtattcatccacaattttaaaagaaaaggggggattggggggtacagtgcaggggaaagaatagtagacataatagcaacagacatacaaactaaag

SEQ ID NO: 19276 - DNA, 301 bp, Artificial Sequence
  Rb1.3_NTC.8
  crRNA array
  misc_feature (148)..(157): n is a, c, g, or t
cttggctttatatatcttgtggaaaggacgaaacaccgtaatttctactaagtgtagatagccaatctggtctaataactaatttctactaagtgtagatcgaccgaggttacgctgggataatttctactaagtgtagatttttttnnnnnnnnnnaagcttggcgtggatccgatatcaactagatcttgagacaaatggcagtattcatccacaattttaaaagaaaaggggggattggggggtacagtgcaggggaaagaatagtagacataatagcaacagacatacaaactaaag

SEQ ID NO: 19277 - DNA, 301 bp, Artificial Sequence
  Rb1.3_NTC.9
  crRNA array
  misc_feature (148)..(157): n is a, c, g, or t
cttggctttatatatcttgtggaaaggacgaaacaccgtaatttctactaagtgtagatagccaatctggtctaataactaatttctactaagtgtagatatcgccgtacggctatggcataatttctactaagtgtagatttttttnnnnnnnnnnaagcttggcgtggatccgatatcaactagatcttgagacaaatggcagtattcatccacaattttaaaagaaaaggggggattggggggtacagtgcaggggaaagaatagtagacataatagcaacagacatacaaactaaag

SEQ ID NO: 19278 - DNA, 301 bp, Artificial Sequence
  Rb1.4_NTC.0
  crRNA array
  misc_feature (148)..(157): n is a, c, g, or t
cttggctttatatatcttgtggaaaggacgaaacaccgtaatttctactaagtgtagattgtagctcagtaaaagtgaataatttctactaagtgtagattatagcgtcgcgcgctaatttaatttctactaagtgtagatttttttnnnnnnnnnnaagcttggcgtggatccgatatcaactagatcttgagacaaatggcagtattcatccacaattttaaaagaaaaggggggattggggggtacagtgcaggggaaagaatagtagacataatagcaacagacatacaaactaaag

SEQ ID NO: 19279 - DNA, 301 bp, Artificial Sequence
  Rb1.4_NTC.1
  crRNA array
  misc_feature (148)..(157): n is a, c, g, or t
cttggctttatatatcttgtggaaaggacgaaacaccgtaatttctactaagtgtagattgtagctcagtaaaagtgaataatttctactaagtgtagatcgcgtaaccgttccggctcctaatttctactaagtgtagatttttttnnnnnnnnnnaagcttggcgtggatccgatatcaactagatcttgagacaaatggcagtattcatccacaattttaaaagaaaaggggggattggggggtacagtgcaggggaaagaatagtagacataatagcaacagacatacaaactaaag

SEQ ID NO: 19280 - DNA, 301 bp, Artificial Sequence
  Rb1.4_NTC.10
  crRNA array
  misc_feature (148)..(157): n is a, c, g, or t
cttggctttatatatcttgtggaaaggacgaaacaccgtaatttctactaagtgtagattgtagctcagtaaaagtgaataatttctactaagtgtagatcgctaagttcgcgcgggccgtaatttctactaagtgtagatttttttnnnnnnnnnnaagcttggcgtggatccgatatcaactagatcttgagacaaatggcagtattcatccacaattttaaaagaaaaggggggattggggggtacagtgcaggggaaagaatagtagacataatagcaacagacatacaaactaaag

SEQ ID NO: 19281 - DNA, 301 bp, Artificial Sequence
  Rb1.4_NTC.11
  crRNA array
  misc_feature (148)..(157): n is a, c, g, or t
cttggctttatatatcttgtggaaaggacgaaacaccgtaatttctactaagtgtagattgtagctcagtaaaagtgaataatttctactaagtgtagatcgttcgtcgacgaagcaatctaatttctactaagtgtagatttttttnnnnnnnnnnaagcttggcgtggatccgatatcaactagatcttgagacaaatggcagtattcatccacaattttaaaagaaaaggggggattggggggtacagtgcaggggaaagaatagtagacataatagcaacagacatacaaactaaag

SEQ ID NO: 19282 - DNA, 301 bp, Artificial Sequence
  Rb1.4_NTC.12
  crRNA array
  misc_feature (148)..(157): n is a, c, g, or t
cttggctttatatatcttgtggaaaggacgaaacaccgtaatttctactaagtgtagattgtagctcagtaaaagtgaataatttctactaagtgtagatcgccgacgattaatcaatagtaatttctactaagtgtagatttttttnnnnnnnnnnaagcttggcgtggatccgatatcaactagatcttgagacaaatggcagtattcatccacaattttaaaagaaaaggggggattggggggtacagtgcaggggaaagaatagtagacataatagcaacagacatacaaactaaag

SEQ ID NO: 19283 - DNA, 301 bp, Artificial Sequence
  Rb1.4_NTC.13
  crRNA array
  misc_feature (148)..(157): n is a, c, g, or t
cttggctttatatatcttgtggaaaggacgaaacaccgtaatttctactaagtgtagattgtagctcagtaaaagtgaataatttctactaagtgtagatgaccgttgtatcgcgatcaataatttctactaagtgtagatttttttnnnnnnnnnnaagcttggcgtggatccgatatcaactagatcttgagacaaatggcagtattcatccacaattttaaaagaaaaggggggattggggggtacagtgcaggggaaagaatagtagacataatagcaacagacatacaaactaaag

SEQ ID NO: 19284 - DNA, 301 bp, Artificial Sequence
  Rb1.4_NTC.14
  crRNA array
  misc_feature (148)..(157): n is a, c, g, or t
cttggctttatatatcttgtggaaaggacgaaacaccgtaatttctactaagtgtagattgtagctcagtaaaagtgaataatttctactaagtgtagatccgttcgtgcgatagtgttttaatttctactaagtgtagatttttttnnnnnnnnnnaagcttggcgtggatccgatatcaactagatcttgagacaaatggcagtattcatccacaattttaaaagaaaaggggggattggggggtacagtgcaggggaaagaatagtagacataatagcaacagacatacaaactaaag

SEQ ID NO: 19285 - DNA, 301 bp, Artificial Sequence
  Rb1.4_NTC.15
  crRNA array
  misc_feature (148)..(157): n is a, c, g, or t
cttggctttatatatcttgtggaaaggacgaaacaccgtaatttctactaagtgtagattgtagctcagtaaaagtgaataatttctactaagtgtagatgttgtcgtgccgcgaatttataatttctactaagtgtagatttttttnnnnnnnnnnaagcttggcgtggatccgatatcaactagatcttgagacaaatggcagtattcatccacaattttaaaagaaaaggggggattggggggtacagtgcaggggaaagaatagtagacataatagcaacagacatacaaactaaag

SEQ ID NO: 19286 - DNA, 301 bp, Artificial Sequence
  Rb1.4_NTC.16
  crRNA array
  misc_feature (148)..(157): n is a, c, g, or t
cttggctttatatatcttgtggaaaggacgaaacaccgtaatttctactaagtgtagattgtagctcagtaaaagtgaataatttctactaagtgtagatcggtacgttagacgaaaatttaatttctactaagtgtagatttttttnnnnnnnnnnaagcttggcgtggatccgatatcaactagatcttgagacaaatggcagtattcatccacaattttaaaagaaaaggggggattggggggtacagtgcaggggaaagaatagtagacataatagcaacagacatacaaactaaag

SEQ ID NO: 19287 - DNA, 301 bp, Artificial Sequence
  Rb1.4_NTC.17
  crRNA array
  misc_feature (148)..(157): n is a, c, g, or t
cttggctttatatatcttgtggaaaggacgaaacaccgtaatttctactaagtgtagattgtagctcagtaaaagtgaataatttctactaagtgtagattatcgaacgctatcgaacgttaatttctactaagtgtagatttttttnnnnnnnnnnaagcttggcgtggatccgatatcaactagatcttgagacaaatggcagtattcatccacaattttaaaagaaaaggggggattggggggtacagtgcaggggaaagaatagtagacataatagcaacagacatacaaactaaag

SEQ ID NO: 19288 - DNA, 301 bp, Artificial Sequence
  Rb1.4_NTC.18
  crRNA array
  misc_feature (148)..(157): n is a, c, g, or t
cttggctttatatatcttgtggaaaggacgaaacaccgtaatttctactaagtgtagattgtagctcagtaaaagtgaataatttctactaagtgtagattccggttacgaccggcaaaataatttctactaagtgtagatttttttnnnnnnnnnnaagcttggcgtggatccgatatcaactagatcttgagacaaatggcagtattcatccacaattttaaaagaaaaggggggattggggggtacagtgcaggggaaagaatagtagacataatagcaacagacatacaaactaaag

SEQ ID NO: 19289 - DNA, 301 bp, Artificial Sequence
  Rb1.4_NTC.19
  crRNA array
  misc_feature (148)..(157): n is a, c, g, or t
cttggctttatatatcttgtggaaaggacgaaacaccgtaatttctactaagtgtagattgtagctcagtaaaagtgaataatttctactaagtgtagatcgtcgtagaacgatacccgataatttctactaagtgtagatttttttnnnnnnnnnnaagcttggcgtggatccgatatcaactagatcttgagacaaatggcagtattcatccacaattttaaaagaaaaggggggattggggggtacagtgcaggggaaagaatagtagacataatagcaacagacatacaaactaaag

SEQ ID NO: 19290 - DNA, 301 bp, Artificial Sequence
  Rb1.4_NTC.2
  crRNA array
  misc_feature (148)..(157): n is a, c, g, or t
cttggctttatatatcttgtggaaaggacgaaacaccgtaatttctactaagtgtagattgtagctcagtaaaagtgaataatttctactaagtgtagatttatgtcgcgccgcgacccgtaatttctactaagtgtagatttttttnnnnnnnnnnaagcttggcgtggatccgatatcaactagatcttgagacaaatggcagtattcatccacaattttaaaagaaaaggggggattggggggtacagtgcaggggaaagaatagtagacataatagcaacagacatacaaactaaag

SEQ ID NO: 19291 - DNA, 301 bp, Artificial Sequence
  Rb1.4_NTC.20
  crRNA array
  misc_feature (148)..(157): n is a, c, g, or t
cttggctttatatatcttgtggaaaggacgaaacaccgtaatttctactaagtgtagattgtagctcagtaaaagtgaataatttctactaagtgtagatattccggcgcgaccagaagataatttctactaagtgtagatttttttnnnnnnnnnnaagcttggcgtggatccgatatcaactagatcttgagacaaatggcagtattcatccacaattttaaaagaaaaggggggattggggggtacagtgcaggggaaagaatagtagacataatagcaacagacatacaaactaaag

SEQ ID NO: 19292 - DNA, 301 bp, Artificial Sequence
  Rb1.4_NTC.21
  crRNA array
  misc_feature (148)..(157): n is a, c, g, or t
cttggctttatatatcttgtggaaaggacgaaacaccgtaatttctactaagtgtagattgtagctcagtaaaagtgaataatttctactaagtgtagatgtataacttcgcgcggtccgtaatttctactaagtgtagatttttttnnnnnnnnnnaagcttggcgtggatccgatatcaactagatcttgagacaaatggcagtattcatccacaattttaaaagaaaaggggggattggggggtacagtgcaggggaaagaatagtagacataatagcaacagacatacaaactaaag

SEQ ID NO: 19293 - DNA, 301 bp, Artificial Sequence
  Rb1.4_NTC.22
  crRNA array
  misc_feature (148)..(157): n is a, c, g, or t
cttggctttatatatcttgtggaaaggacgaaacaccgtaatttctactaagtgtagattgtagctcagtaaaagtgaataatttctactaagtgtagatgcgcgtcaacgtaatgtgcctaatttctactaagtgtagatttttttnnnnnnnnnnaagcttggcgtggatccgatatcaactagatcttgagacaaatggcagtattcatccacaattttaaaagaaaaggggggattggggggtacagtgcaggggaaagaatagtagacataatagcaacagacatacaaactaaag

SEQ ID NO: 19294 - DNA, 301 bp, Artificial Sequence
  Rb1.4_NTC.23
  crRNA array
  misc_feature (148)..(157): n is a, c, g, or t
cttggctttatatatcttgtggaaaggacgaaacaccgtaatttctactaagtgtagattgtagctcagtaaaagtgaataatttctactaagtgtagatacgcgctattatcgtaggtgtaatttctactaagtgtagatttttttnnnnnnnnnnaagcttggcgtggatccgatatcaactagatcttgagacaaatggcagtattcatccacaattttaaaagaaaaggggggattggggggtacagtgcaggggaaagaatagtagacataatagcaacagacatacaaactaaag

SEQ ID NO: 19295 - DNA, 301 bp, Artificial Sequence
  Rb1.4_NTC.24
  crRNA array
  misc_feature (148)..(157): n is a, c, g, or t
cttggctttatatatcttgtggaaaggacgaaacaccgtaatttctactaagtgtagattgtagctcagtaaaagtgaataatttctactaagtgtagatactatcgacgttcgtcccggtaatttctactaagtgtagatttttttnnnnnnnnnnaagcttggcgtggatccgatatcaactagatcttgagacaaatggcagtattcatccacaattttaaaagaaaaggggggattggggggtacagtgcaggggaaagaatagtagacataatagcaacagacatacaaactaaag

SEQ ID NO: 19296 - DNA, 301 bp, Artificial Sequence
  Rb1.4_NTC.25
  crRNA array
  misc_feature (148)..(157): n is a, c, g, or t
cttggctttatatatcttgtggaaaggacgaaacaccgtaatttctactaagtgtagattgtagctcagtaaaagtgaataatttctactaagtgtagattcgcgttatcgtgccgtgcgtaatttctactaagtgtagatttttttnnnnnnnnnnaagcttggcgtggatccgatatcaactagatcttgagacaaatggcagtattcatccacaattttaaaagaaaaggggggattggggggtacagtgcaggggaaagaatagtagacataatagcaacagacatacaaactaaag

SEQ ID NO: 19297 - DNA, 301 bp, Artificial Sequence
  Rb1.4_NTC.26
  crRNA array
  misc_feature (148)..(157): n is a, c, g, or t
cttggctttatatatcttgtggaaaggacgaaacaccgtaatttctactaagtgtagattgtagctcagtaaaagtgaataatttctactaagtgtagatcgcgacggcggttttaacactaatttctactaagtgtagatttttttnnnnnnnnnnaagcttggcgtggatccgatatcaactagatcttgagacaaatggcagtattcatccacaattttaaaagaaaaggggggattggggggtacagtgcaggggaaagaatagtagacataatagcaacagacatacaaactaaag

SEQ ID NO: 19298 - DNA, 301 bp, Artificial Sequence
  Rb1.4_NTC.27
  crRNA array
  misc_feature (148)..(157): n is a, c, g, or t
cttggctttatatatcttgtggaaaggacgaaacaccgtaatttctactaagtgtagattgtagctcagtaaaagtgaataatttctactaagtgtagatgtcgcgttgcgaccggcgcttaatttctactaagtgtagatttttttnnnnnnnnnnaagcttggcgtggatccgatatcaactagatcttgagacaaatggcagtattcatccacaattttaaaagaaaaggggggattggggggtacagtgcaggggaaagaatagtagacataatagcaacagacatacaaactaaag

SEQ ID NO: 19299 - DNA, 301 bp, Artificial Sequence
  Rb1.4_NTC.28
  crRNA array
  misc_feature (148)..(157): n is a, c, g, or t
cttggctttatatatcttgtggaaaggacgaaacaccgtaatttctactaagtgtagattgtagctcagtaaaagtgaataatttctactaagtgtagataccgctaatcggcgtaaacttaatttctactaagtgtagatttttttnnnnnnnnnnaagcttggcgtggatccgatatcaactagatcttgagacaaatggcagtattcatccacaattttaaaagaaaaggggggattggggggtacagtgcaggggaaagaatagtagacataatagcaacagacatacaaactaaag

SEQ ID NO: 19300 - DNA, 301 bp, Artificial Sequence
  Rb1.4_NTC.29
  crRNA array
  misc_feature (148)..(157): n is a, c, g, or t
cttggctttatatatcttgtggaaaggacgaaacaccgtaatttctactaagtgtagattgtagctcagtaaaagtgaataatttctactaagtgtagatcgcgatctataccgtctatataatttctactaagtgtagatttttttnnnnnnnnnnaagcttggcgtggatccgatatcaactagatcttgagacaaatggcagtattcatccacaattttaaaagaaaaggggggattggggggtacagtgcaggggaaagaatagtagacataatagcaacagacatacaaactaaag

SEQ ID NO: 19301 - DNA, 301 bp, Artificial Sequence
  Rb1.4_NTC.3
  crRNA array
  misc_feature (148)..(157): n is a, c, g, or t
cttggctttatatatcttgtggaaaggacgaaacaccgtaatttctactaagtgtagattgtagctcagtaaaagtgaataatttctactaagtgtagattcgacgcgagacgacgtacataatttctactaagtgtagatttttttnnnnnnnnnnaagcttggcgtggatccgatatcaactagatcttgagacaaatggcagtattcatccacaattttaaaagaaaaggggggattggggggtacagtgcaggggaaagaatagtagacataatagcaacagacatacaaactaaag

SEQ ID NO: 19302 - DNA, 301 bp, Artificial Sequence
  Rb1.4_NTC.30
  crRNA array
  misc_feature (148)..(157): n is a, c, g, or t
cttggctttatatatcttgtggaaaggacgaaacaccgtaatttctactaagtgtagattgtagctcagtaaaagtgaataatttctactaagtgtagatcgatcgtacgggtgtcctaataatttctactaagtgtagatttttttnnnnnnnnnnaagcttggcgtggatccgatatcaactagatcttgagacaaatggcagtattcatccacaattttaaaagaaaaggggggattggggggtacagtgcaggggaaagaatagtagacataatagcaacagacatacaaactaaag

SEQ ID NO: 19303 - DNA, 301 bp, Artificial Sequence
  Rb1.4_NTC.31
  crRNA array
  misc_feature (148)..(157): n is a, c, g, or t
cttggctttatatatcttgtggaaaggacgaaacaccgtaatttctactaagtgtagattgtagctcagtaaaagtgaataatttctactaagtgtagatgccgaccgcgtgattgtaggtaatttctactaagtgtagatttttttnnnnnnnnnnaagcttggcgtggatccgatatcaactagatcttgagacaaatggcagtattcatccacaattttaaaagaaaaggggggattggggggtacagtgcaggggaaagaatagtagacataatagcaacagacatacaaactaaag

SEQ ID NO: 19304 - DNA, 301 bp, Artificial Sequence
  Rb1.4_NTC.32
  crRNA array
  misc_feature (148)..(157): n is a, c, g, or t
cttggctttatatatcttgtggaaaggacgaaacaccgtaatttctactaagtgtagattgtagctcagtaaaagtgaataatttctactaagtgtagatgcacgttacgcccgggtcactaatttctactaagtgtagatttttttnnnnnnnnnnaagcttggcgtggatccgatatcaactagatcttgagacaaatggcagtattcatccacaattttaaaagaaaaggggggattggggggtacagtgcaggggaaagaatagtagacataatagcaacagacatacaaactaaag

SEQ ID NO: 19305 - DNA, 301 bp, Artificial Sequence
  Rb1.4_NTC.33
  crRNA array
  misc_feature (148)..(157): n is a, c, g, or t
cttggctttatatatcttgtggaaaggacgaaacaccgtaatttctactaagtgtagattgtagctcagtaaaagtgaataatttctactaagtgtagattaagcgaccgacgcattcgctaatttctactaagtgtagatttttttnnnnnnnnnnaagcttggcgtggatccgatatcaactagatcttgagacaaatggcagtattcatccacaattttaaaagaaaaggggggattggggggtacagtgcaggggaaagaatagtagacataatagcaacagacatacaaactaaag

SEQ ID NO: 19306 - DNA, 301 bp, Artificial Sequence
  Rb1.4_NTC.34
  crRNA array
  misc_feature (148)..(157): n is a, c, g, or t
cttggctttatatatcttgtggaaaggacgaaacaccgtaatttctactaagtgtagattgtagctcagtaaaagtgaataatttctactaagtgtagattagcgttcgacacgtgaaactaatttctactaagtgtagatttttttnnnnnnnnnnaagcttggcgtggatccgatatcaactagatcttgagacaaatggcagtattcatccacaattttaaaagaaaaggggggattggggggtacagtgcaggggaaagaatagtagacataatagcaacagacatacaaactaaag

SEQ ID NO: 19307 - DNA, 301 bp, Artificial Sequence
  Rb1.4_NTC.35
  crRNA array
  misc_feature (148)..(157): n is a, c, g, or t
cttggctttatatatcttgtggaaaggacgaaacaccgtaatttctactaagtgtagattgtagctcagtaaaagtgaataatttctactaagtgtagattggcgcgtaatcgctattcgtaatttctactaagtgtagatttttttnnnnnnnnnnaagcttggcgtggatccgatatcaactagatcttgagacaaatggcagtattcatccacaattttaaaagaaaaggggggattggggggtacagtgcaggggaaagaatagtagacataatagcaacagacatacaaactaaag

SEQ ID NO: 19308 - DNA, 301 bp, Artificial Sequence
  Rb1.4_NTC.36
  crRNA array
  misc_feature (148)..(157): n is a, c, g, or t
cttggctttatatatcttgtggaaaggacgaaacaccgtaatttctactaagtgtagattgtagctcagtaaaagtgaataatttctactaagtgtagatcaacccgccgtagcgggccttaatttctactaagtgtagatttttttnnnnnnnnnnaagcttggcgtggatccgatatcaactagatcttgagacaaatggcagtattcatccacaattttaaaagaaaaggggggattggggggtacagtgcaggggaaagaatagtagacataatagcaacagacatacaaactaaag

SEQ ID NO: 19309 - DNA, 301 bp, Artificial Sequence
  Rb1.4_NTC.37
  crRNA array
  misc_feature (148)..(157): n is a, c, g, or t
cttggctttatatatcttgtggaaaggacgaaacaccgtaatttctactaagtgtagattgtagctcagtaaaagtgaataatttctactaagtgtagattttgcgttgacgcgattacttaatttctactaagtgtagatttttttnnnnnnnnnnaagcttggcgtggatccgatatcaactagatcttgagacaaatggcagtattcatccacaattttaaaagaaaaggggggattggggggtacagtgcaggggaaagaatagtagacataatagcaacagacatacaaactaaag

SEQ ID NO: 19310 - DNA, 301 bp, Artificial Sequence
  Rb1.4_NTC.38
  crRNA array
  misc_feature (148)..(157): n is a, c, g, or t
cttggctttatatatcttgtggaaaggacgaaacaccgtaatttctactaagtgtagattgtagctcagtaaaagtgaataatttctactaagtgtagataacggagcgcgatactaccataatttctactaagtgtagatttttttnnnnnnnnnnaagcttggcgtggatccgatatcaactagatcttgagacaaatggcagtattcatccacaattttaaaagaaaaggggggattggggggtacagtgcaggggaaagaatagtagacataatagcaacagacatacaaactaaag

SEQ ID NO: 19311 - DNA, 301 bp, Artificial Sequence
  Rb1.4_NTC.39
  crRNA array
  misc_feature (148)..(157): n is a, c, g, or t
cttggctttatatatcttgtggaaaggacgaaacaccgtaatttctactaagtgtagattgtagctcagtaaaagtgaataatttctactaagtgtagatccggacgttataacgtttcttaatttctactaagtgtagatttttttnnnnnnnnnnaagcttggcgtggatccgatatcaactagatcttgagacaaatggcagtattcatccacaattttaaaagaaaaggggggattggggggtacagtgcaggggaaagaatagtagacataatagcaacagacatacaaactaaag

SEQ ID NO: 19312 - DNA, 301 bp, Artificial Sequence
  Rb1.4_NTC.4
  crRNA array
  misc_feature (148)..(157): n is a, c, g, or t
cttggctttatatatcttgtggaaaggacgaaacaccgtaatttctactaagtgtagattgtagctcagtaaaagtgaataatttctactaagtgtagatatacccgtcgcgaacgtgagtaatttctactaagtgtagatttttttnnnnnnnnnnaagcttggcgtggatccgatatcaactagatcttgagacaaatggcagtattcatccacaattttaaaagaaaaggggggattggggggtacagtgcaggggaaagaatagtagacataatagcaacagacatacaaactaaag

SEQ ID NO: 19313 - DNA, 301 bp, Artificial Sequence
  Rb1.4_NTC.40
  crRNA array
  misc_feature (148)..(157): n is a, c, g, or t
cttggctttatatatcttgtggaaaggacgaaacaccgtaatttctactaagtgtagattgtagctcagtaaaagtgaataatttctactaagtgtagatattcgcgaacccggccggaataatttctactaagtgtagatttttttnnnnnnnnnnaagcttggcgtggatccgatatcaactagatcttgagacaaatggcagtattcatccacaattttaaaagaaaaggggggattggggggtacagtgcaggggaaagaatagtagacataatagcaacagacatacaaactaaag

SEQ ID NO: 19314 - DNA, 301 bp, Artificial Sequence
  Rb1.4_NTC.41
  crRNA array
  misc_feature (148)..(157): n is a, c, g, or t
cttggctttatatatcttgtggaaaggacgaaacaccgtaatttctactaagtgtagattgtagctcagtaaaagtgaataatttctactaagtgtagatttgatggcgcgacgcgttattaatttctactaagtgtagatttttttnnnnnnnnnnaagcttggcgtggatccgatatcaactagatcttgagacaaatggcagtattcatccacaattttaaaagaaaaggggggattggggggtacagtgcaggggaaagaatagtagacataatagcaacagacatacaaactaaag

SEQ ID NO: 19315 - DNA, 301 bp, Artificial Sequence
  Rb1.4_NTC.42
  crRNA array
  misc_feature (148)..(157): n is a, c, g, or t
cttggctttatatatcttgtggaaaggacgaaacaccgtaatttctactaagtgtagattgtagctcagtaaaagtgaataatttctactaagtgtagatggtcaaatcgcggcgataactaatttctactaagtgtagatttttttnnnnnnnnnnaagcttggcgtggatccgatatcaactagatcttgagacaaatggcagtattcatccacaattttaaaagaaaaggggggattggggggtacagtgcaggggaaagaatagtagacataatagcaacagacatacaaactaaag

SEQ ID NO: 19316 - DNA, 301 bp, Artificial Sequence
  Rb1.4_NTC.43
  crRNA array
  misc_feature (148)..(157): n is a, c, g, or t
cttggctttatatatcttgtggaaaggacgaaacaccgtaatttctactaagtgtagattgtagctcagtaaaagtgaataatttctactaagtgtagatcgactcgcgcattgaactggtaatttctactaagtgtagatttttttnnnnnnnnnnaagcttggcgtggatccgatatcaactagatcttgagacaaatggcagtattcatccacaattttaaaagaaaaggggggattggggggtacagtgcaggggaaagaatagtagacataatagcaacagacatacaaactaaag

SEQ ID NO: 19317 - DNA, 301 bp, Artificial Sequence
  Rb1.4_NTC.44
  crRNA array
  misc_feature (148)..(157): n is a, c, g, or t
cttggctttatatatcttgtggaaaggacgaaacaccgtaatttctactaagtgtagattgtagctcagtaaaagtgaataatttctactaagtgtagatagcgtcgtacgatttatcgttaatttctactaagtgtagatttttttnnnnnnnnnnaagcttggcgtggatccgatatcaactagatcttgagacaaatggcagtattcatccacaattttaaaagaaaaggggggattggggggtacagtgcaggggaaagaatagtagacataatagcaacagacatacaaactaaag

SEQ ID NO: 19318 - DNA, 301 bp, Artificial Sequence
  Rb1.4_NTC.45
  crRNA array
  misc_feature (148)..(157): n is a, c, g, or t
cttggctttatatatcttgtggaaaggacgaaacaccgtaatttctactaagtgtagattgtagctcagtaaaagtgaataatttctactaagtgtagatcggaacgcgtgatactagggtaatttctactaagtgtagatttttttnnnnnnnnnnaagcttggcgtggatccgatatcaactagatcttgagacaaatggcagtattcatccacaattttaaaagaaaaggggggattggggggtacagtgcaggggaaagaatagtagacataatagcaacagacatacaaactaaag

SEQ ID NO: 19319 - DNA, 301 bp, Artificial Sequence
  Rb1.4_NTC.46
  crRNA array
  misc_feature (148)..(157): n is a, c, g, or t
cttggctttatatatcttgtggaaaggacgaaacaccgtaatttctactaagtgtagattgtagctcagtaaaagtgaataatttctactaagtgtagatagcgggtcgtagacgcgcggtaatttctactaagtgtagatttttttnnnnnnnnnnaagcttggcgtggatccgatatcaactagatcttgagacaaatggcagtattcatccacaattttaaaagaaaaggggggattggggggtacagtgcaggggaaagaatagtagacataatagcaacagacatacaaactaaag

SEQ ID NO: 19320 - DNA, 301 bp, Artificial Sequence
  Rb1.4_NTC.47
  crRNA array
  misc_feature (148)..(157): n is a, c, g, or t
cttggctttatatatcttgtggaaaggacgaaacaccgtaatttctactaagtgtagattgtagctcagtaaaagtgaataatttctactaagtgtagattctcgtatcgcgattgttaataatttctactaagtgtagatttttttnnnnnnnnnnaagcttggcgtggatccgatatcaactagatcttgagacaaatggcagtattcatccacaattttaaaagaaaaggggggattggggggtacagtgcaggggaaagaatagtagacataatagcaacagacatacaaactaaag

SEQ ID NO: 19321 - DNA, 301 bp, Artificial Sequence
  Rb1.4_NTC.48
  crRNA array
  misc_feature (148)..(157): n is a, c, g, or t
cttggctttatatatcttgtggaaaggacgaaacaccgtaatttctactaagtgtagattgtagctcagtaaaagtgaataatttctactaagtgtagatcggtcgactacggctgttagtaatttctactaagtgtagatttttttnnnnnnnnnnaagcttggcgtggatccgatatcaactagatcttgagacaaatggcagtattcatccacaattttaaaagaaaaggggggattggggggtacagtgcaggggaaagaatagtagacataatagcaacagacatacaaactaaag

SEQ ID NO: 19322 - DNA, 301 bp, Artificial Sequence
  Rb1.4_NTC.49
  crRNA array
  misc_feature (148)..(157): n is a, c, g, or t
cttggctttatatatcttgtggaaaggacgaaacaccgtaatttctactaagtgtagattgtagctcagtaaaagtgaataatttctactaagtgtagattcggggcgcgtcaactgaattaatttctactaagtgtagatttttttnnnnnnnnnnaagcttggcgtggatccgatatcaactagatcttgagacaaatggcagtattcatccacaattttaaaagaaaaggggggattggggggtacagtgcaggggaaagaatagtagacataatagcaacagacatacaaactaaag

SEQ ID NO: 19323 - DNA, 301 bp, Artificial Sequence
  Rb1.4_NTC.5
  crRNA array
  misc_feature (148)..(157): n is a, c, g, or t
cttggctttatatatcttgtggaaaggacgaaacaccgtaatttctactaagtgtagattgtagctcagtaaaagtgaataatttctactaagtgtagatgcttacgcgtcgcgaatgtataatttctactaagtgtagatttttttnnnnnnnnnnaagcttggcgtggatccgatatcaactagatcttgagacaaatggcagtattcatccacaattttaaaagaaaaggggggattggggggtacagtgcaggggaaagaatagtagacataatagcaacagacatacaaactaaag

SEQ ID NO: 19324 - DNA, 301 bp, Artificial Sequence
  Rb1.4_NTC.50
  crRNA array
  misc_feature (148)..(157): n is a, c, g, or t
cttggctttatatatcttgtggaaaggacgaaacaccgtaatttctactaagtgtagattgtagctcagtaaaagtgaataatttctactaagtgtagatattgccgctcgcgcaaaatctaatttctactaagtgtagatttttttnnnnnnnnnnaagcttggcgtggatccgatatcaactagatcttgagacaaatggcagtattcatccacaattttaaaagaaaaggggggattggggggtacagtgcaggggaaagaatagtagacataatagcaacagacatacaaactaaag

SEQ ID NO: 19325 - DNA, 301 bp, Artificial Sequence
  Rb1.4_NTC.51
  crRNA array
  misc_feature (148)..(157): n is a, c, g, or t
cttggctttatatatcttgtggaaaggacgaaacaccgtaatttctactaagtgtagattgtagctcagtaaaagtgaataatttctactaagtgtagattaacgcgcaacacgccaatgtaatttctactaagtgtagatttttttnnnnnnnnnnaagcttggcgtggatccgatatcaactagatcttgagacaaatggcagtattcatccacaattttaaaagaaaaggggggattggggggtacagtgcaggggaaagaatagtagacataatagcaacagacatacaaactaaag

SEQ ID NO: 19326 - DNA, 301 bp, Artificial Sequence
  Rb1.4_NTC.6
  crRNA array
  misc_feature (148)..(157): n is a, c, g, or t
cttggctttatatatcttgtggaaaggacgaaacaccgtaatttctactaagtgtagattgtagctcagtaaaagtgaataatttctactaagtgtagatcgaatcgcgcctacgggaattaatttctactaagtgtagatttttttnnnnnnnnnnaagcttggcgtggatccgatatcaactagatcttgagacaaatggcagtattcatccacaattttaaaagaaaaggggggattggggggtacagtgcaggggaaagaatagtagacataatagcaacagacatacaaactaaag

SEQ ID NO: 19327 - DNA, 301 bp, Artificial Sequence
  Rb1.4_NTC.7
  crRNA array
  misc_feature (148)..(157): n is a, c, g, or t
cttggctttatatatcttgtggaaaggacgaaacaccgtaatttctactaagtgtagattgtagctcagtaaaagtgaataatttctactaagtgtagatcgccgaacggataagactattaatttctactaagtgtagatttttttnnnnnnnnnnaagcttggcgtggatccgatatcaactagatcttgagacaaatggcagtattcatccacaattttaaaagaaaaggggggattggggggtacagtgcaggggaaagaatagtagacataatagcaacagacatacaaactaaag

SEQ ID NO: 19328 - DNA, 301 bp, Artificial Sequence
  Rb1.4_NTC.8
  crRNA array
  misc_feature (148)..(157): n is a, c, g, or t
cttggctttatatatcttgtggaaaggacgaaacaccgtaatttctactaagtgtagattgtagctcagtaaaagtgaataatttctactaagtgtagatcgaccgaggttacgctgggataatttctactaagtgtagatttttttnnnnnnnnnnaagcttggcgtggatccgatatcaactagatcttgagacaaatggcagtattcatccacaattttaaaagaaaaggggggattggggggtacagtgcaggggaaagaatagtagacataatagcaacagacatacaaactaaag

SEQ ID NO: 19329 - DNA, 301 bp, Artificial Sequence
  Rb1.4_NTC.9
  crRNA array
  misc_feature (148)..(157): n is a, c, g, or t
cttggctttatatatcttgtggaaaggacgaaacaccgtaatttctactaagtgtagattgtagctcagtaaaagtgaataatttctactaagtgtagatatcgccgtacggctatggcataatttctactaagtgtagatttttttnnnnnnnnnnaagcttggcgtggatccgatatcaactagatcttgagacaaatggcagtattcatccacaattttaaaagaaaaggggggattggggggtacagtgcaggggaaagaatagtagacataatagcaacagacatacaaactaaag

SEQ ID NO: 19330 - DNA, 301 bp, Artificial Sequence
  Trim72.1_NTC.0
  crRNA array
  misc_feature (148)..(157): n is a, c, g, or t
cttggctttatatatcttgtggaaaggacgaaacaccgtaatttctactaagtgtagataccccagctctgcgcacccgtaatttctactaagtgtagattatagcgtcgcgcgctaatttaatttctactaagtgtagatttttttnnnnnnnnnnaagcttggcgtggatccgatatcaactagatcttgagacaaatggcagtattcatccacaattttaaaagaaaaggggggattggggggtacagtgcaggggaaagaatagtagacataatagcaacagacatacaaactaaag

SEQ ID NO: 19331 - DNA, 301 bp, Artificial Sequence
  Trim72.1_NTC.1
  crRNA array
  misc_feature (148)..(157): n is a, c, g, or t
cttggctttatatatcttgtggaaaggacgaaacaccgtaatttctactaagtgtagataccccagctctgcgcacccgtaatttctactaagtgtagatcgcgtaaccgttccggctcctaatttctactaagtgtagatttttttnnnnnnnnnnaagcttggcgtggatccgatatcaactagatcttgagacaaatggcagtattcatccacaattttaaaagaaaaggggggattggggggtacagtgcaggggaaagaatagtagacataatagcaacagacatacaaactaaag

SEQ ID NO: 19332 - DNA, 301 bp, Artificial Sequence
  Trim72.1_NTC.10
  crRNA array
  misc_feature (148)..(157): n is a, c, g, or t
cttggctttatatatcttgtggaaaggacgaaacaccgtaatttctactaagtgtagataccccagctctgcgcacccgtaatttctactaagtgtagatcgctaagttcgcgcgggccgtaatttctactaagtgtagatttttttnnnnnnnnnnaagcttggcgtggatccgatatcaactagatcttgagacaaatggcagtattcatccacaattttaaaagaaaaggggggattggggggtacagtgcaggggaaagaatagtagacataatagcaacagacatacaaactaaag

SEQ ID NO: 19333 - DNA, 301 bp, Artificial Sequence
  Trim72.1_NTC.11
  crRNA array
  misc_feature (148)..(157): n is a, c, g, or t
cttggctttatatatcttgtggaaaggacgaaacaccgtaatttctactaagtgtagataccccagctctgcgcacccgtaatttctactaagtgtagatcgttcgtcgacgaagcaatctaatttctactaagtgtagatttttttnnnnnnnnnnaagcttggcgtggatccgatatcaactagatcttgagacaaatggcagtattcatccacaattttaaaagaaaaggggggattggggggtacagtgcaggggaaagaatagtagacataatagcaacagacatacaaactaaag

SEQ ID NO: 19334 - DNA, 301 bp, Artificial Sequence
  Trim72.1_NTC.12
  crRNA array
  misc_feature (148)..(157): n is a, c, g, or t
cttggctttatatatcttgtggaaaggacgaaacaccgtaatttctactaagtgtagataccccagctctgcgcacccgtaatttctactaagtgtagatcgccgacgattaatcaatagtaatttctactaagtgtagatttttttnnnnnnnnnnaagcttggcgtggatccgatatcaactagatcttgagacaaatggcagtattcatccacaattttaaaagaaaaggggggattggggggtacagtgcaggggaaagaatagtagacataatagcaacagacatacaaactaaag

SEQ ID NO: 19335 - DNA, 301 bp, Artificial Sequence
  Trim72.1_NTC.13
  crRNA array
  misc_feature (148)..(157): n is a, c, g, or t
cttggctttatatatcttgtggaaaggacgaaacaccgtaatttctactaagtgtagataccccagctctgcgcacccgtaatttctactaagtgtagatgaccgttgtatcgcgatcaataatttctactaagtgtagatttttttnnnnnnnnnnaagcttggcgtggatccgatatcaactagatcttgagacaaatggcagtattcatccacaattttaaaagaaaaggggggattggggggtacagtgcaggggaaagaatagtagacataatagcaacagacatacaaactaaag

SEQ ID NO: 19336 - DNA, 301 bp, Artificial Sequence
  Trim72.1_NTC.14
  crRNA array
  misc_feature (148)..(157): n is a, c, g, or t
cttggctttatatatcttgtggaaaggacgaaacaccgtaatttctactaagtgtagataccccagctctgcgcacccgtaatttctactaagtgtagatccgttcgtgcgatagtgttttaatttctactaagtgtagatttttttnnnnnnnnnnaagcttggcgtggatccgatatcaactagatcttgagacaaatggcagtattcatccacaattttaaaagaaaaggggggattggggggtacagtgcaggggaaagaatagtagacataatagcaacagacatacaaactaaag

SEQ ID NO: 19337 - DNA, 301 bp, Artificial Sequence
  Trim72.1_NTC.15
  crRNA array
  misc_feature (148)..(157): n is a, c, g, or t
cttggctttatatatcttgtggaaaggacgaaacaccgtaatttctactaagtgtagataccccagctctgcgcacccgtaatttctactaagtgtagatgttgtcgtgccgcgaatttataatttctactaagtgtagatttttttnnnnnnnnnnaagcttggcgtggatccgatatcaactagatcttgagacaaatggcagtattcatccacaattttaaaagaaaaggggggattggggggtacagtgcaggggaaagaatagtagacataatagcaacagacatacaaactaaag

SEQ ID NO: 19338 - DNA, 301 bp, Artificial Sequence
  Trim72.1_NTC.16
  crRNA array
  misc_feature (148)..(157): n is a, c, g, or t
cttggctttatatatcttgtggaaaggacgaaacaccgtaatttctactaagtgtagataccccagctctgcgcacccgtaatttctactaagtgtagatcggtacgttagacgaaaatttaatttctactaagtgtagatttttttnnnnnnnnnnaagcttggcgtggatccgatatcaactagatcttgagacaaatggcagtattcatccacaattttaaaagaaaaggggggattggggggtacagtgcaggggaaagaatagtagacataatagcaacagacatacaaactaaag

SEQ ID NO: 19339 - DNA, 301 bp, Artificial Sequence
  Trim72.1_NTC.17
  crRNA array
  misc_feature (148)..(157): n is a, c, g, or t
cttggctttatatatcttgtggaaaggacgaaacaccgtaatttctactaagtgtagataccccagctctgcgcacccgtaatttctactaagtgtagattatcgaacgctatcgaacgttaatttctactaagtgtagatttttttnnnnnnnnnnaagcttggcgtggatccgatatcaactagatcttgagacaaatggcagtattcatccacaattttaaaagaaaaggggggattggggggtacagtgcaggggaaagaatagtagacataatagcaacagacatacaaactaaag

SEQ ID NO: 19340 - DNA, 301 bp, Artificial Sequence
  Trim72.1_NTC.18
  crRNA array
  misc_feature (148)..(157): n is a, c, g, or t
cttggctttatatatcttgtggaaaggacgaaacaccgtaatttctactaagtgtagataccccagctctgcgcacccgtaatttctactaagtgtagattccggttacgaccggcaaaataatttctactaagtgtagatttttttnnnnnnnnnnaagcttggcgtggatccgatatcaactagatcttgagacaaatggcagtattcatccacaattttaaaagaaaaggggggattggggggtacagtgcaggggaaagaatagtagacataatagcaacagacatacaaactaaag

SEQ ID NO: 19341 - DNA, 301 bp, Artificial Sequence
  Trim72.1_NTC.19
  crRNA array
  misc_feature (148)..(157): n is a, c, g, or t
cttggctttatatatcttgtggaaaggacgaaacaccgtaatttctactaagtgtagataccccagctctgcgcacccgtaatttctactaagtgtagatcgtcgtagaacgatacccgataatttctactaagtgtagatttttttnnnnnnnnnnaagcttggcgtggatccgatatcaactagatcttgagacaaatggcagtattcatccacaattttaaaagaaaaggggggattggggggtacagtgcaggggaaagaatagtagacataatagcaacagacatacaaactaaag

SEQ ID NO: 19342 - DNA, 301 bp, Artificial Sequence
  Trim72.1_NTC.2
  crRNA array
  misc_feature (148)..(157): n is a, c, g, or t
cttggctttatatatcttgtggaaaggacgaaacaccgtaatttctactaagtgtagataccccagctctgcgcacccgtaatttctactaagtgtagatttatgtcgcgccgcgacccgtaatttctactaagtgtagatttttttnnnnnnnnnnaagcttggcgtggatccgatatcaactagatcttgagacaaatggcagtattcatccacaattttaaaagaaaaggggggattggggggtacagtgcaggggaaagaatagtagacataatagcaacagacatacaaactaaag

SEQ ID NO: 19343 - DNA, 301 bp, Artificial Sequence
  Trim72.1_NTC.20
  crRNA array
  misc_feature (148)..(157): n is a, c, g, or t
cttggctttatatatcttgtggaaaggacgaaacaccgtaatttctactaagtgtagataccccagctctgcgcacccgtaatttctactaagtgtagatattccggcgcgaccagaagataatttctactaagtgtagatttttttnnnnnnnnnnaagcttggcgtggatccgatatcaactagatcttgagacaaatggcagtattcatccacaattttaaaagaaaaggggggattggggggtacagtgcaggggaaagaatagtagacataatagcaacagacatacaaactaaag

SEQ ID NO: 19344 - DNA, 301 bp, Artificial Sequence
  Trim72.1_NTC.21
  crRNA array
  misc_feature (148)..(157): n is a, c, g, or t
cttggctttatatatcttgtggaaaggacgaaacaccgtaatttctactaagtgtagataccccagctctgcgcacccgtaatttctactaagtgtagatgtataacttcgcgcggtccgtaatttctactaagtgtagatttttttnnnnnnnnnnaagcttggcgtggatccgatatcaactagatcttgagacaaatggcagtattcatccacaattttaaaagaaaaggggggattggggggtacagtgcaggggaaagaatagtagacataatagcaacagacatacaaactaaag

SEQ ID NO: 19345 - DNA, 301 bp, Artificial Sequence
  Trim72.1_NTC.22
  crRNA array
  misc_feature (148)..(157): n is a, c, g, or t
cttggctttatatatcttgtggaaaggacgaaacaccgtaatttctactaagtgtagataccccagctctgcgcacccgtaatttctactaagtgtagatgcgcgtcaacgtaatgtgcctaatttctactaagtgtagatttttttnnnnnnnnnnaagcttggcgtggatccgatatcaactagatcttgagacaaatggcagtattcatccacaattttaaaagaaaaggggggattggggggtacagtgcaggggaaagaatagtagacataatagcaacagacatacaaactaaag

SEQ ID NO: 19346 - DNA, 301 bp, Artificial Sequence
  Trim72.1_NTC.23
  crRNA array
  misc_feature (148)..(157): n is a, c, g, or t
cttggctttatatatcttgtggaaaggacgaaacaccgtaatttctactaagtgtagataccccagctctgcgcacccgtaatttctactaagtgtagatacgcgctattatcgtaggtgtaatttctactaagtgtagatttttttnnnnnnnnnnaagcttggcgtggatccgatatcaactagatcttgagacaaatggcagtattcatccacaattttaaaagaaaaggggggattggggggtacagtgcaggggaaagaatagtagacataatagcaacagacatacaaactaaag

SEQ ID NO: 19347 - DNA, 301 bp, Artificial Sequence
  Trim72.1_NTC.24
  crRNA array
  misc_feature (148)..(157): n is a, c, g, or t
cttggctttatatatcttgtggaaaggacgaaacaccgtaatttctactaagtgtagataccccagctctgcgcacccgtaatttctactaagtgtagatactatcgacgttcgtcccggtaatttctactaagtgtagatttttttnnnnnnnnnnaagcttggcgtggatccgatatcaactagatcttgagacaaatggcagtattcatccacaattttaaaagaaaaggggggattggggggtacagtgcaggggaaagaatagtagacataatagcaacagacatacaaactaaag

SEQ ID NO: 19348 - DNA, 301 bp, Artificial Sequence
  Trim72.1_NTC.25
  crRNA array
  misc_feature (148)..(157): n is a, c, g, or t
cttggctttatatatcttgtggaaaggacgaaacaccgtaatttctactaagtgtagataccccagctctgcgcacccgtaatttctactaagtgtagattcgcgttatcgtgccgtgcgtaatttctactaagtgtagatttttttnnnnnnnnnnaagcttggcgtggatccgatatcaactagatcttgagacaaatggcagtattcatccacaattttaaaagaaaaggggggattggggggtacagtgcaggggaaagaatagtagacataatagcaacagacatacaaactaaag

SEQ ID NO: 19349 - DNA, 301 bp, Artificial Sequence
  Trim72.1_NTC.26
  crRNA array
  misc_feature (148)..(157): n is a, c, g, or t
cttggctttatatatcttgtggaaaggacgaaacaccgtaatttctactaagtgtagataccccagctctgcgcacccgtaatttctactaagtgtagatcgcgacggcggttttaacactaatttctactaagtgtagatttttttnnnnnnnnnnaagcttggcgtggatccgatatcaactagatcttgagacaaatggcagtattcatccacaattttaaaagaaaaggggggattggggggtacagtgcaggggaaagaatagtagacataatagcaacagacatacaaactaaag

SEQ ID NO: 19350 - DNA, 301 bp, Artificial Sequence
  Trim72.1_NTC.27
  crRNA array
  misc_feature (148)..(157): n is a, c, g, or t
cttggctttatatatcttgtggaaaggacgaaacaccgtaatttctactaagtgtagataccccagctctgcgcacccgtaatttctactaagtgtagatgtcgcgttgcgaccggcgcttaatttctactaagtgtagatttttttnnnnnnnnnnaagcttggcgtggatccgatatcaactagatcttgagacaaatggcagtattcatccacaattttaaaagaaaaggggggattggggggtacagtgcaggggaaagaatagtagacataatagcaacagacatacaaactaaag

SEQ ID NO: 19351 - DNA, 301 bp, Artificial Sequence
  Trim72.1_NTC.28
  crRNA array
  misc_feature (148)..(157): n is a, c, g, or t
cttggctttatatatcttgtggaaaggacgaaacaccgtaatttctactaagtgtagataccccagctctgcgcacccgtaatttctactaagtgtagataccgctaatcggcgtaaacttaatttctactaagtgtagatttttttnnnnnnnnnnaagcttggcgtggatccgatatcaactagatcttgagacaaatggcagtattcatccacaattttaaaagaaaaggggggattggggggtacagtgcaggggaaagaatagtagacataatagcaacagacatacaaactaaag

SEQ ID NO: 19352 - DNA, 301 bp, Artificial Sequence
  Trim72.1_NTC.29
  crRNA array
  misc_feature (148)..(157): n is a, c, g, or t
cttggctttatatatcttgtggaaaggacgaaacaccgtaatttctactaagtgtagataccccagctctgcgcacccgtaatttctactaagtgtagatcgcgatctataccgtctatataatttctactaagtgtagatttttttnnnnnnnnnnaagcttggcgtggatccgatatcaactagatcttgagacaaatggcagtattcatccacaattttaaaagaaaaggggggattggggggtacagtgcaggggaaagaatagtagacataatagcaacagacatacaaactaaag

SEQ ID NO: 19353 - DNA, 301 bp, Artificial Sequence
  Trim72.1_NTC.3
  crRNA array
  misc_feature (148)..(157): n is a, c, g, or t
cttggctttatatatcttgtggaaaggacgaaacaccgtaatttctactaagtgtagataccccagctctgcgcacccgtaatttctactaagtgtagattcgacgcgagacgacgtacataatttctactaagtgtagatttttttnnnnnnnnnnaagcttggcgtggatccgatatcaactagatcttgagacaaatggcagtattcatccacaattttaaaagaaaaggggggattggggggtacagtgcaggggaaagaatagtagacataatagcaacagacatacaaactaaag

SEQ ID NO: 19354 - DNA, 301 bp, Artificial Sequence
  Trim72.1_NTC.30
  crRNA array
  misc_feature (148)..(157): n is a, c, g, or t
cttggctttatatatcttgtggaaaggacgaaacaccgtaatttctactaagtgtagataccccagctctgcgcacccgtaatttctactaagtgtagatcgatcgtacgggtgtcctaataatttctactaagtgtagatttttttnnnnnnnnnnaagcttggcgtggatccgatatcaactagatcttgagacaaatggcagtattcatccacaattttaaaagaaaaggggggattggggggtacagtgcaggggaaagaatagtagacataatagcaacagacatacaaactaaag

SEQ ID NO: 19355 - DNA, 301 bp, Artificial Sequence
  Trim72.1_NTC.31
  crRNA array
  misc_feature (148)..(157): n is a, c, g, or t
cttggctttatatatcttgtggaaaggacgaaacaccgtaatttctactaagtgtagataccccagctctgcgcacccgtaatttctactaagtgtagatgccgaccgcgtgattgtaggtaatttctactaagtgtagatttttttnnnnnnnnnnaagcttggcgtggatccgatatcaactagatcttgagacaaatggcagtattcatccacaattttaaaagaaaaggggggattggggggtacagtgcaggggaaagaatagtagacataatagcaacagacatacaaactaaag

SEQ ID NO: 19356 - DNA, 301 bp, Artificial Sequence
  Trim72.1_NTC.32
  crRNA array
  misc_feature (148)..(157): n is a, c, g, or t
cttggctttatatatcttgtggaaaggacgaaacaccgtaatttctactaagtgtagataccccagctctgcgcacccgtaatttctactaagtgtagatgcacgttacgcccgggtcactaatttctactaagtgtagatttttttnnnnnnnnnnaagcttggcgtggatccgatatcaactagatcttgagacaaatggcagtattcatccacaattttaaaagaaaaggggggattggggggtacagtgcaggggaaagaatagtagacataatagcaacagacatacaaactaaag

SEQ ID NO: 19357 - DNA, 301 bp, Artificial Sequence
  Trim72.1_NTC.33
  crRNA array
  misc_feature (148)..(157): n is a, c, g, or t
cttggctttatatatcttgtggaaaggacgaaacaccgtaatttctactaagtgtagataccccagctctgcgcacccgtaatttctactaagtgtagattaagcgaccgacgcattcgctaatttctactaagtgtagatttttttnnnnnnnnnnaagcttggcgtggatccgatatcaactagatcttgagacaaatggcagtattcatccacaattttaaaagaaaaggggggattggggggtacagtgcaggggaaagaatagtagacataatagcaacagacatacaaactaaag

SEQ ID NO: 19358 - DNA, 301 bp, Artificial Sequence
  Trim72.1_NTC.34
  crRNA array
  misc_feature (148)..(157): n is a, c, g, or t
cttggctttatatatcttgtggaaaggacgaaacaccgtaatttctactaagtgtagataccccagctctgcgcacccgtaatttctactaagtgtagattagcgttcgacacgtgaaactaatttctactaagtgtagatttttttnnnnnnnnnnaagcttggcgtggatccgatatcaactagatcttgagacaaatggcagtattcatccacaattttaaaagaaaaggggggattggggggtacagtgcaggggaaagaatagtagacataatagcaacagacatacaaactaaag

SEQ ID NO: 19359 - DNA, 301 bp, Artificial Sequence
  Trim72.1_NTC.35
  crRNA array
  misc_feature (148)..(157): n is a, c, g, or t
cttggctttatatatcttgtggaaaggacgaaacaccgtaatttctactaagtgtagataccccagctctgcgcacccgtaatttctactaagtgtagattggcgcgtaatcgctattcgtaatttctactaagtgtagatttttttnnnnnnnnnnaagcttggcgtggatccgatatcaactagatcttgagacaaatggcagtattcatccacaattttaaaagaaaaggggggattggggggtacagtgcaggggaaagaatagtagacataatagcaacagacatacaaactaaag

SEQ ID NO: 19360 - DNA, 301 bp, Artificial Sequence
  Trim72.1_NTC.36
  crRNA array
  misc_feature (148)..(157): n is a, c, g, or t
cttggctttatatatcttgtggaaaggacgaaacaccgtaatttctactaagtgtagataccccagctctgcgcacccgtaatttctactaagtgtagatcaacccgccgtagcgggccttaatttctactaagtgtagatttttttnnnnnnnnnnaagcttggcgtggatccgatatcaactagatcttgagacaaatggcagtattcatccacaattttaaaagaaaaggggggattggggggtacagtgcaggggaaagaatagtagacataatagcaacagacatacaaactaaag

SEQ ID NO: 19361 - DNA, 301 bp, Artificial Sequence
  Trim72.1_NTC.37
  crRNA array
  misc_feature (148)..(157): n is a, c, g, or t
cttggctttatatatcttgtggaaaggacgaaacaccgtaatttctactaagtgtagataccccagctctgcgcacccgtaatttctactaagtgtagattttgcgttgacgcgattacttaatttctactaagtgtagatttttttnnnnnnnnnnaagcttggcgtggatccgatatcaactagatcttgagacaaatggcagtattcatccacaattttaaaagaaaaggggggattggggggtacagtgcaggggaaagaatagtagacataatagcaacagacatacaaactaaag

SEQ ID NO: 19362 - DNA, 301 bp, Artificial Sequence
  Trim72.1_NTC.38
  crRNA array
  misc_feature (148)..(157): n is a, c, g, or t
cttggctttatatatcttgtggaaaggacgaaacaccgtaatttctactaagtgtagataccccagctctgcgcacccgtaatttctactaagtgtagataacggagcgcgatactaccataatttctactaagtgtagatttttttnnnnnnnnnnaagcttggcgtggatccgatatcaactagatcttgagacaaatggcagtattcatccacaattttaaaagaaaaggggggattggggggtacagtgcaggggaaagaatagtagacataatagcaacagacatacaaactaaag

SEQ ID NO: 19363 - DNA, 301 bp, Artificial Sequence
  Trim72.1_NTC.39
  crRNA array
  misc_feature (148)..(157): n is a, c, g, or t
cttggctttatatatcttgtggaaaggacgaaacaccgtaatttctactaagtgtagataccccagctctgcgcacccgtaatttctactaagtgtagatccggacgttataacgtttcttaatttctactaagtgtagatttttttnnnnnnnnnnaagcttggcgtggatccgatatcaactagatcttgagacaaatggcagtattcatccacaattttaaaagaaaaggggggattggggggtacagtgcaggggaaagaatagtagacataatagcaacagacatacaaactaaag

SEQ ID NO: 19364 - DNA, 301 bp, Artificial Sequence
  Trim72.1_NTC.4
  crRNA array
  misc_feature (148)..(157): n is a, c, g, or t
cttggctttatatatcttgtggaaaggacgaaacaccgtaatttctactaagtgtagataccccagctctgcgcacccgtaatttctactaagtgtagatatacccgtcgcgaacgtgagtaatttctactaagtgtagatttttttnnnnnnnnnnaagcttggcgtggatccgatatcaactagatcttgagacaaatggcagtattcatccacaattttaaaagaaaaggggggattggggggtacagtgcaggggaaagaatagtagacataatagcaacagacatacaaactaaag

SEQ ID NO: 19365 - DNA, 301 bp, Artificial Sequence
  Trim72.1_NTC.40
  crRNA array
  misc_feature (148)..(157): n is a, c, g, or t
cttggctttatatatcttgtggaaaggacgaaacaccgtaatttctactaagtgtagataccccagctctgcgcacccgtaatttctactaagtgtagatattcgcgaacccggccggaataatttctactaagtgtagatttttttnnnnnnnnnnaagcttggcgtggatccgatatcaactagatcttgagacaaatggcagtattcatccacaattttaaaagaaaaggggggattggggggtacagtgcaggggaaagaatagtagacataatagcaacagacatacaaactaaag

SEQ ID NO: 19366 - DNA, 301 bp, Artificial Sequence
  Trim72.1_NTC.41
  crRNA array
  misc_feature (148)..(157): n is a, c, g, or t
cttggctttatatatcttgtggaaaggacgaaacaccgtaatttctactaagtgtagataccccagctctgcgcacccgtaatttctactaagtgtagatttgatggcgcgacgcgttattaatttctactaagtgtagatttttttnnnnnnnnnnaagcttggcgtggatccgatatcaactagatcttgagacaaatggcagtattcatccacaattttaaaagaaaaggggggattggggggtacagtgcaggggaaagaatagtagacataatagcaacagacatacaaactaaag

SEQ ID NO: 19367 - DNA, 301 bp, Artificial Sequence
  Trim72.1_NTC.42
  crRNA array
  misc_feature (148)..(157): n is a, c, g, or t
cttggctttatatatcttgtggaaaggacgaaacaccgtaatttctactaagtgtagataccccagctctgcgcacccgtaatttctactaagtgtagatggtcaaatcgcggcgataactaatttctactaagtgtagatttttttnnnnnnnnnnaagcttggcgtggatccgatatcaactagatcttgagacaaatggcagtattcatccacaattttaaaagaaaaggggggattggggggtacagtgcaggggaaagaatagtagacataatagcaacagacatacaaactaaag

SEQ ID NO: 19368 - DNA, 301 bp, Artificial Sequence
  Trim72.1_NTC.43
  crRNA array
  misc_feature (148)..(157): n is a, c, g, or t
cttggctttatatatcttgtggaaaggacgaaacaccgtaatttctactaagtgtagataccccagctctgcgcacccgtaatttctactaagtgtagatcgactcgcgcattgaactggtaatttctactaagtgtagatttttttnnnnnnnnnnaagcttggcgtggatccgatatcaactagatcttgagacaaatggcagtattcatccacaattttaaaagaaaaggggggattggggggtacagtgcaggggaaagaatagtagacataatagcaacagacatacaaactaaag

SEQ ID NO: 19369 - DNA, 301 bp, Artificial Sequence
  Trim72.1_NTC.44
  crRNA array
  misc_feature (148)..(157): n is a, c, g, or t
cttggctttatatatcttgtggaaaggacgaaacaccgtaatttctactaagtgtagataccccagctctgcgcacccgtaatttctactaagtgtagatagcgtcgtacgatttatcgttaatttctactaagtgtagatttttttnnnnnnnnnnaagcttggcgtggatccgatatcaactagatcttgagacaaatggcagtattcatccacaattttaaaagaaaaggggggattggggggtacagtgcaggggaaagaatagtagacataatagcaacagacatacaaactaaag

SEQ ID NO: 19370 - DNA, 301 bp, Artificial Sequence
  Trim72.1_NTC.45
  crRNA array
  misc_feature (148)..(157): n is a, c, g, or t
cttggctttatatatcttgtggaaaggacgaaacaccgtaatttctactaagtgtagataccccagctctgcgcacccgtaatttctactaagtgtagatcggaacgcgtgatactagggtaatttctactaagtgtagatttttttnnnnnnnnnnaagcttggcgtggatccgatatcaactagatcttgagacaaatggcagtattcatccacaattttaaaagaaaaggggggattggggggtacagtgcaggggaaagaatagtagacataatagcaacagacatacaaactaaag

SEQ ID NO: 19371 - DNA, 301 bp, Artificial Sequence
  Trim72.1_NTC.46
  crRNA array
  misc_feature (148)..(157): n is a, c, g, or t
cttggctttatatatcttgtggaaaggacgaaacaccgtaatttctactaagtgtagataccccagctctgcgcacccgtaatttctactaagtgtagatagcgggtcgtagacgcgcggtaatttctactaagtgtagatttttttnnnnnnnnnnaagcttggcgtggatccgatatcaactagatcttgagacaaatggcagtattcatccacaattttaaaagaaaaggggggattggggggtacagtgcaggggaaagaatagtagacataatagcaacagacatacaaactaaag

SEQ ID NO: 19372 - DNA, 301 bp, Artificial Sequence
  Trim72.1_NTC.47
  crRNA array
  misc_feature (148)..(157): n is a, c, g, or t
cttggctttatatatcttgtggaaaggacgaaacaccgtaatttctactaagtgtagataccccagctctgcgcacccgtaatttctactaagtgtagattctcgtatcgcgattgttaataatttctactaagtgtagatttttttnnnnnnnnnnaagcttggcgtggatccgatatcaactagatcttgagacaaatggcagtattcatccacaattttaaaagaaaaggggggattggggggtacagtgcaggggaaagaatagtagacataatagcaacagacatacaaactaaag

SEQ ID NO: 19373 - DNA, 301 bp, Artificial Sequence
  Trim72.1_NTC.48
  crRNA array
  misc_feature (148)..(157): n is a, c, g, or t
cttggctttatatatcttgtggaaaggacgaaacaccgtaatttctactaagtgtagataccccagctctgcgcacccgtaatttctactaagtgtagatcggtcgactacggctgttagtaatttctactaagtgtagatttttttnnnnnnnnnnaagcttggcgtggatccgatatcaactagatcttgagacaaatggcagtattcatccacaattttaaaagaaaaggggggattggggggtacagtgcaggggaaagaatagtagacataatagcaacagacatacaaactaaag

SEQ ID NO: 19374 - DNA, 301 bp, Artificial Sequence
  Trim72.1_NTC.49
  crRNA array
  misc_feature (148)..(157): n is a, c, g, or t
cttggctttatatatcttgtggaaaggacgaaacaccgtaatttctactaagtgtagataccccagctctgcgcacccgtaatttctactaagtgtagattcggggcgcgtcaactgaattaatttctactaagtgtagatttttttnnnnnnnnnnaagcttggcgtggatccgatatcaactagatcttgagacaaatggcagtattcatccacaattttaaaagaaaaggggggattggggggtacagtgcaggggaaagaatagtagacataatagcaacagacatacaaactaaag

SEQ ID NO: 19375 - DNA, 301 bp, Artificial Sequence
  Trim72.1_NTC.5
  crRNA array
  misc_feature (148)..(157): n is a, c, g, or t
cttggctttatatatcttgtggaaaggacgaaacaccgtaatttctactaagtgtagataccccagctctgcgcacccgtaatttctactaagtgtagatgcttacgcgtcgcgaatgtataatttctactaagtgtagatttttttnnnnnnnnnnaagcttggcgtggatccgatatcaactagatcttgagacaaatggcagtattcatccacaattttaaaagaaaaggggggattggggggtacagtgcaggggaaagaatagtagacataatagcaacagacatacaaactaaag

SEQ ID NO: 19376 - DNA, 301 bp, Artificial Sequence
  Trim72.1_NTC.50
  crRNA array
  misc_feature (148)..(157): n is a, c, g, or t
cttggctttatatatcttgtggaaaggacgaaacaccgtaatttctactaagtgtagataccccagctctgcgcacccgtaatttctactaagtgtagatattgccgctcgcgcaaaatctaatttctactaagtgtagatttttttnnnnnnnnnnaagcttggcgtggatccgatatcaactagatcttgagacaaatggcagtattcatccacaattttaaaagaaaaggggggattggggggtacagtgcaggggaaagaatagtagacataatagcaacagacatacaaactaaag

SEQ ID NO: 19377 - DNA, 301 bp, Artificial Sequence
  Trim72.1_NTC.51
  crRNA array
  misc_feature (148)..(157): n is a, c, g, or t
cttggctttatatatcttgtggaaaggacgaaacaccgtaatttctactaagtgtagataccccagctctgcgcacccgtaatttctactaagtgtagattaacgcgcaacacgccaatgtaatttctactaagtgtagatttttttnnnnnnnnnnaagcttggcgtggatccgatatcaactagatcttgagacaaatggcagtattcatccacaattttaaaagaaaaggggggattggggggtacagtgcaggggaaagaatagtagacataatagcaacagacatacaaactaaag

SEQ ID NO: 19378 - DNA, 301 bp, Artificial Sequence
  Trim72.1_NTC.6
  crRNA array
  misc_feature (148)..(157): n is a, c, g, or t
cttggctttatatatcttgtggaaaggacgaaacaccgtaatttctactaagtgtagataccccagctctgcgcacccgtaatttctactaagtgtagatcgaatcgcgcctacgggaattaatttctactaagtgtagatttttttnnnnnnnnnnaagcttggcgtggatccgatatcaactagatcttgagacaaatggcagtattcatccacaattttaaaagaaaaggggggattggggggtacagtgcaggggaaagaatagtagacataatagcaacagacatacaaactaaag

SEQ ID NO: 19379 - DNA, 301 bp, Artificial Sequence
  Trim72.1_NTC.7
  crRNA array
  misc_feature (148)..(157): n is a, c, g, or t
cttggctttatatatcttgtggaaaggacgaaacaccgtaatttctactaagtgtagataccccagctctgcgcacccgtaatttctactaagtgtagatcgccgaacggataagactattaatttctactaagtgtagatttttttnnnnnnnnnnaagcttggcgtggatccgatatcaactagatcttgagacaaatggcagtattcatccacaattttaaaagaaaaggggggattggggggtacagtgcaggggaaagaatagtagacataatagcaacagacatacaaactaaag

SEQ ID NO: 19380 - DNA, 301 bp, Artificial Sequence
  Trim72.1_NTC.8
  crRNA array
  misc_feature (148)..(157): n is a, c, g, or t
cttggctttatatatcttgtggaaaggacgaaacaccgtaatttctactaagtgtagataccccagctctgcgcacccgtaatttctactaagtgtagatcgaccgaggttacgctgggataatttctactaagtgtagatttttttnnnnnnnnnnaagcttggcgtggatccgatatcaactagatcttgagacaaatggcagtattcatccacaattttaaaagaaaaggggggattggggggtacagtgcaggggaaagaatagtagacataatagcaacagacatacaaactaaag

SEQ ID NO: 19381 - DNA, 301 bp, Artificial Sequence
  Trim72.1_NTC.9
  crRNA array
  misc_feature (148)..(157): n is a, c, g, or t
cttggctttatatatcttgtggaaaggacgaaacaccgtaatttctactaagtgtagataccccagctctgcgcacccgtaatttctactaagtgtagatatcgccgtacggctatggcataatttctactaagtgtagatttttttnnnnnnnnnnaagcttggcgtggatccgatatcaactagatcttgagacaaatggcagtattcatccacaattttaaaagaaaaggggggattggggggtacagtgcaggggaaagaatagtagacataatagcaacagacatacaaactaaag

SEQ ID NO: 19382 - DNA, 301 bp, Artificial Sequence
  Trim72.2_NTC.0
  crRNA array
  misc_feature (148)..(157): n is a, c, g, or t
cttggctttatatatcttgtggaaaggacgaaacaccgtaatttctactaagtgtagatcacgagcgtctgcccgggcctaatttctactaagtgtagattatagcgtcgcgcgctaatttaatttctactaagtgtagatttttttnnnnnnnnnnaagcttggcgtggatccgatatcaactagatcttgagacaaatggcagtattcatccacaattttaaaagaaaaggggggattggggggtacagtgcaggggaaagaatagtagacataatagcaacagacatacaaactaaag

SEQ ID NO: 19383 - DNA, 301 bp, Artificial Sequence
  Trim72.2_NTC.1
  crRNA array
  misc_feature (148)..(157): n is a, c, g, or t
cttggctttatatatcttgtggaaaggacgaaacaccgtaatttctactaagtgtagatcacgagcgtctgcccgggcctaatttctactaagtgtagatcgcgtaaccgttccggctcctaatttctactaagtgtagatttttttnnnnnnnnnnaagcttggcgtggatccgatatcaactagatcttgagacaaatggcagtattcatccacaattttaaaagaaaaggggggattggggggtacagtgcaggggaaagaatagtagacataatagcaacagacatacaaactaaag

SEQ ID NO: 19384 - DNA, 301 bp, Artificial Sequence
  Trim72.2_NTC.10
  crRNA array
  misc_feature (148)..(157): n is a, c, g, or t
cttggctttatatatcttgtggaaaggacgaaacaccgtaatttctactaagtgtagatcacgagcgtctgcccgggcctaatttctactaagtgtagatcgctaagttcgcgcgggccgtaatttctactaagtgtagatttttttnnnnnnnnnnaagcttggcgtggatccgatatcaactagatcttgagacaaatggcagtattcatccacaattttaaaagaaaaggggggattggggggtacagtgcaggggaaagaatagtagacataatagcaacagacatacaaactaaag

SEQ ID NO: 19385 - DNA, 301 bp, Artificial Sequence
  Trim72.2_NTC.11
  crRNA array
  misc_feature (148)..(157): n is a, c, g, or t
cttggctttatatatcttgtggaaaggacgaaacaccgtaatttctactaagtgtagatcacgagcgtctgcccgggcctaatttctactaagtgtagatcgttcgtcgacgaagcaatctaatttctactaagtgtagatttttttnnnnnnnnnnaagcttggcgtggatccgatatcaactagatcttgagacaaatggcagtattcatccacaattttaaaagaaaaggggggattggggggtacagtgcaggggaaagaatagtagacataatagcaacagacatacaaactaaag

SEQ ID NO: 19386 - DNA, 301 bp, Artificial Sequence
  Trim72.2_NTC.12
  crRNA array
  misc_feature (148)..(157): n is a, c, g, or t
cttggctttatatatcttgtggaaaggacgaaacaccgtaatttctactaagtgtagatcacgagcgtctgcccgggcctaatttctactaagtgtagatcgccgacgattaatcaatagtaatttctactaagtgtagatttttttnnnnnnnnnnaagcttggcgtggatccgatatcaactagatcttgagacaaatggcagtattcatccacaattttaaaagaaaaggggggattggggggtacagtgcaggggaaagaatagtagacataatagcaacagacatacaaactaaag

SEQ ID NO: 19387 - DNA, 301 bp, Artificial Sequence
  Trim72.2_NTC.13
  crRNA array
  misc_feature (148)..(157): n is a, c, g, or t
cttggctttatatatcttgtggaaaggacgaaacaccgtaatttctactaagtgtagatcacgagcgtctgcccgggcctaatttctactaagtgtagatgaccgttgtatcgcgatcaataatttctactaagtgtagatttttttnnnnnnnnnnaagcttggcgtggatccgatatcaactagatcttgagacaaatggcagtattcatccacaattttaaaagaaaaggggggattggggggtacagtgcaggggaaagaatagtagacataatagcaacagacatacaaactaaag

SEQ ID NO: 19388 - DNA, 301 bp, Artificial Sequence
  Trim72.2_NTC.14
  crRNA array
  misc_feature (148)..(157): n is a, c, g, or t
cttggctttatatatcttgtggaaaggacgaaacaccgtaatttctactaagtgtagatcacgagcgtctgcccgggcctaatttctactaagtgtagatccgttcgtgcgatagtgttttaatttctactaagtgtagatttttttnnnnnnnnnnaagcttggcgtggatccgatatcaactagatcttgagacaaatggcagtattcatccacaattttaaaagaaaaggggggattggggggtacagtgcaggggaaagaatagtagacataatagcaacagacatacaaactaaag

SEQ ID NO: 19389 - DNA, 301 bp, Artificial Sequence
  Trim72.2_NTC.15
  crRNA array
  misc_feature (148)..(157): n is a, c, g, or t
cttggctttatatatcttgtggaaaggacgaaacaccgtaatttctactaagtgtagatcacgagcgtctgcccgggcctaatttctactaagtgtagatgttgtcgtgccgcgaatttataatttctactaagtgtagatttttttnnnnnnnnnnaagcttggcgtggatccgatatcaactagatcttgagacaaatggcagtattcatccacaattttaaaagaaaaggggggattggggggtacagtgcaggggaaagaatagtagacataatagcaacagacatacaaactaaag

SEQ ID NO: 19390 - DNA, 301 bp, Artificial Sequence
  Trim72.2_NTC.16
  crRNA array
  misc_feature (148)..(157): n is a, c, g, or t
cttggctttatatatcttgtggaaaggacgaaacaccgtaatttctactaagtgtagatcacgagcgtctgcccgggcctaatttctactaagtgtagatcggtacgttagacgaaaatttaatttctactaagtgtagatttttttnnnnnnnnnnaagcttggcgtggatccgatatcaactagatcttgagacaaatggcagtattcatccacaattttaaaagaaaaggggggattggggggtacagtgcaggggaaagaatagtagacataatagcaacagacatacaaactaaag

SEQ ID NO: 19391 - DNA, 301 bp, Artificial Sequence
  Trim72.2_NTC.17
  crRNA array
  misc_feature (148)..(157): n is a, c, g, or t
cttggctttatatatcttgtggaaaggacgaaacaccgtaatttctactaagtgtagatcacgagcgtctgcccgggcctaatttctactaagtgtagattatcgaacgctatcgaacgttaatttctactaagtgtagatttttttnnnnnnnnnnaagcttggcgtggatccgatatcaactagatcttgagacaaatggcagtattcatccacaattttaaaagaaaaggggggattggggggtacagtgcaggggaaagaatagtagacataatagcaacagacatacaaactaaag

SEQ ID NO: 19392 - DNA, 301 bp, Artificial Sequence
  Trim72.2_NTC.18
  crRNA array
  misc_feature (148)..(157): n is a, c, g, or t
cttggctttatatatcttgtggaaaggacgaaacaccgtaatttctactaagtgtagatcacgagcgtctgcccgggcctaatttctactaagtgtagattccggttacgaccggcaaaataatttctactaagtgtagatttttttnnnnnnnnnnaagcttggcgtggatccgatatcaactagatcttgagacaaatggcagtattcatccacaattttaaaagaaaaggggggattggggggtacagtgcaggggaaagaatagtagacataatagcaacagacatacaaactaaag

SEQ ID NO: 19393 - DNA, 301 bp, Artificial Sequence
  Trim72.2_NTC.19
  crRNA array
  misc_feature (148)..(157): n is a, c, g, or t
cttggctttatatatcttgtggaaaggacgaaacaccgtaatttctactaagtgtagatcacgagcgtctgcccgggcctaatttctactaagtgtagatcgtcgtagaacgatacccgataatttctactaagtgtagatttttttnnnnnnnnnnaagcttggcgtggatccgatatcaactagatcttgagacaaatggcagtattcatccacaattttaaaagaaaaggggggattggggggtacagtgcaggggaaagaatagtagacataatagcaacagacatacaaactaaag

SEQ ID NO: 19394 - DNA, 301 bp, Artificial Sequence
  Trim72.2_NTC.2
  crRNA array
  misc_feature (148)..(157): n is a, c, g, or t
cttggctttatatatcttgtggaaaggacgaaacaccgtaatttctactaagtgtagatcacgagcgtctgcccgggcctaatttctactaagtgtagatttatgtcgcgccgcgacccgtaatttctactaagtgtagatttttttnnnnnnnnnnaagcttggcgtggatccgatatcaactagatcttgagacaaatggcagtattcatccacaattttaaaagaaaaggggggattggggggtacagtgcaggggaaagaatagtagacataatagcaacagacatacaaactaaag

SEQ ID NO: 19395 - DNA, 301 bp, Artificial Sequence
  Trim72.2_NTC.20
  crRNA array
  misc_feature (148)..(157): n is a, c, g, or t
cttggctttatatatcttgtggaaaggacgaaacaccgtaatttctactaagtgtagatcacgagcgtctgcccgggcctaatttctactaagtgtagatattccggcgcgaccagaagataatttctactaagtgtagatttttttnnnnnnnnnnaagcttggcgtggatccgatatcaactagatcttgagacaaatggcagtattcatccacaattttaaaagaaaaggggggattggggggtacagtgcaggggaaagaatagtagacataatagcaacagacatacaaactaaag

SEQ ID NO: 19396 - DNA, 301 bp, Artificial Sequence
  Trim72.2_NTC.21
  crRNA array
  misc_feature (148)..(157): n is a, c, g, or t
cttggctttatatatcttgtggaaaggacgaaacaccgtaatttctactaagtgtagatcacgagcgtctgcccgggcctaatttctactaagtgtagatgtataacttcgcgcggtccgtaatttctactaagtgtagatttttttnnnnnnnnnnaagcttggcgtggatccgatatcaactagatcttgagacaaatggcagtattcatccacaattttaaaagaaaaggggggattggggggtacagtgcaggggaaagaatagtagacataatagcaacagacatacaaactaaag

SEQ ID NO: 19397 - DNA, 301 bp, Artificial Sequence
  Trim72.2_NTC.22
  crRNA array
  misc_feature (148)..(157): n is a, c, g, or t
cttggctttatatatcttgtggaaaggacgaaacaccgtaatttctactaagtgtagatcacgagcgtctgcccgggcctaatttctactaagtgtagatgcgcgtcaacgtaatgtgcctaatttctactaagtgtagatttttttnnnnnnnnnnaagcttggcgtggatccgatatcaactagatcttgagacaaatggcagtattcatccacaattttaaaagaaaaggggggattggggggtacagtgcaggggaaagaatagtagacataatagcaacagacatacaaactaaag

SEQ ID NO: 19398 - DNA, 301 bp, Artificial Sequence
  Trim72.2_NTC.23
  crRNA array
  misc_feature (148)..(157): n is a, c, g, or t
cttggctttatatatcttgtggaaaggacgaaacaccgtaatttctactaagtgtagatcacgagcgtctgcccgggcctaatttctactaagtgtagatacgcgctattatcgtaggtgtaatttctactaagtgtagatttttttnnnnnnnnnnaagcttggcgtggatccgatatcaactagatcttgagacaaatggcagtattcatccacaattttaaaagaaaaggggggattggggggtacagtgcaggggaaagaatagtagacataatagcaacagacatacaaactaaag

SEQ ID NO: 19399 - DNA, 301 bp, Artificial Sequence
  Trim72.2_NTC.24
  crRNA array
  misc_feature (148)..(157): n is a, c, g, or t
cttggctttatatatcttgtggaaaggacgaaacaccgtaatttctactaagtgtagatcacgagcgtctgcccgggcctaatttctactaagtgtagatactatcgacgttcgtcccggtaatttctactaagtgtagatttttttnnnnnnnnnnaagcttggcgtggatccgatatcaactagatcttgagacaaatggcagtattcatccacaattttaaaagaaaaggggggattggggggtacagtgcaggggaaagaatagtagacataatagcaacagacatacaaactaaag

SEQ ID NO: 19400 - DNA, 301 bp, Artificial Sequence
  Trim72.2_NTC.25
  crRNA array
  misc_feature (148)..(157): n is a, c, g, or t
cttggctttatatatcttgtggaaaggacgaaacaccgtaatttctactaagtgtagatcacgagcgtctgcccgggcctaatttctactaagtgtagattcgcgttatcgtgccgtgcgtaatttctactaagtgtagatttttttnnnnnnnnnnaagcttggcgtggatccgatatcaactagatcttgagacaaatggcagtattcatccacaattttaaaagaaaaggggggattggggggtacagtgcaggggaaagaatagtagacataatagcaacagacatacaaactaaag

SEQ ID NO: 19401 - DNA, 301 bp, Artificial Sequence
  Trim72.2_NTC.26
  crRNA array
  misc_feature (148)..(157): n is a, c, g, or t
cttggctttatatatcttgtggaaaggacgaaacaccgtaatttctactaagtgtagatcacgagcgtctgcccgggcctaatttctactaagtgtagatcgcgacggcggttttaacactaatttctactaagtgtagatttttttnnnnnnnnnnaagcttggcgtggatccgatatcaactagatcttgagacaaatggcagtattcatccacaattttaaaagaaaaggggggattggggggtacagtgcaggggaaagaatagtagacataatagcaacagacatacaaactaaag

SEQ ID NO: 19402 - DNA, 301 bp, Artificial Sequence
  Trim72.2_NTC.27
  crRNA array
  misc_feature (148)..(157): n is a, c, g, or t
cttggctttatatatcttgtggaaaggacgaaacaccgtaatttctactaagtgtagatcacgagcgtctgcccgggcctaatttctactaagtgtagatgtcgcgttgcgaccggcgcttaatttctactaagtgtagatttttttnnnnnnnnnnaagcttggcgtggatccgatatcaactagatcttgagacaaatggcagtattcatccacaattttaaaagaaaaggggggattggggggtacagtgcaggggaaagaatagtagacataatagcaacagacatacaaactaaag

SEQ ID NO: 19403 - DNA, 301 bp, Artificial Sequence
  Trim72.2_NTC.28
  crRNA array
  misc_feature (148)..(157): n is a, c, g, or t
cttggctttatatatcttgtggaaaggacgaaacaccgtaatttctactaagtgtagatcacgagcgtctgcccgggcctaatttctactaagtgtagataccgctaatcggcgtaaacttaatttctactaagtgtagatttttttnnnnnnnnnnaagcttggcgtggatccgatatcaactagatcttgagacaaatggcagtattcatccacaattttaaaagaaaaggggggattggggggtacagtgcaggggaaagaatagtagacataatagcaacagacatacaaactaaag

SEQ ID NO: 19404 - DNA, 301 bp, Artificial Sequence
  Trim72.2_NTC.29
  crRNA array
  misc_feature (148)..(157): n is a, c, g, or t
cttggctttatatatcttgtggaaaggacgaaacaccgtaatttctactaagtgtagatcacgagcgtctgcccgggcctaatttctactaagtgtagatcgcgatctataccgtctatataatttctactaagtgtagatttttttnnnnnnnnnnaagcttggcgtggatccgatatcaactagatcttgagacaaatggcagtattcatccacaattttaaaagaaaaggggggattggggggtacagtgcaggggaaagaatagtagacataatagcaacagacatacaaactaaag

SEQ ID NO: 19405 - DNA, 301 bp, Artificial Sequence
  Trim72.2_NTC.3
  crRNA array
  misc_feature (148)..(157): n is a, c, g, or t
cttggctttatatatcttgtggaaaggacgaaacaccgtaatttctactaagtgtagatcacgagcgtctgcccgggcctaatttctactaagtgtagattcgacgcgagacgacgtacataatttctactaagtgtagatttttttnnnnnnnnnnaagcttggcgtggatccgatatcaactagatcttgagacaaatggcagtattcatccacaattttaaaagaaaaggggggattggggggtacagtgcaggggaaagaatagtagacataatagcaacagacatacaaactaaag

SEQ ID NO: 19406 - DNA, 301 bp, Artificial Sequence
  Trim72.2_NTC.30
  crRNA array
  misc_feature (148)..(157): n is a, c, g, or t
cttggctttatatatcttgtggaaaggacgaaacaccgtaatttctactaagtgtagatcacgagcgtctgcccgggcctaatttctactaagtgtagatcgatcgtacgggtgtcctaataatttctactaagtgtagatttttttnnnnnnnnnnaagcttggcgtggatccgatatcaactagatcttgagacaaatggcagtattcatccacaattttaaaagaaaaggggggattggggggtacagtgcaggggaaagaatagtagacataatagcaacagacatacaaactaaag

SEQ ID NO: 19407 - DNA, 301 bp, Artificial Sequence
  Trim72.2_NTC.31
  crRNA array
  misc_feature (148)..(157): n is a, c, g, or t
cttggctttatatatcttgtggaaaggacgaaacaccgtaatttctactaagtgtagatcacgagcgtctgcccgggcctaatttctactaagtgtagatgccgaccgcgtgattgtaggtaatttctactaagtgtagatttttttnnnnnnnnnnaagcttggcgtggatccgatatcaactagatcttgagacaaatggcagtattcatccacaattttaaaagaaaaggggggattggggggtacagtgcaggggaaagaatagtagacataatagcaacagacatacaaactaaag

SEQ ID NO: 19408 - DNA, 301 bp, Artificial Sequence
  Trim72.2_NTC.32
  crRNA array
  misc_feature (148)..(157): n is a, c, g, or t
cttggctttatatatcttgtggaaaggacgaaacaccgtaatttctactaagtgtagatcacgagcgtctgcccgggcctaatttctactaagtgtagatgcacgttacgcccgggtcactaatttctactaagtgtagatttttttnnnnnnnnnnaagcttggcgtggatccgatatcaactagatcttgagacaaatggcagtattcatccacaattttaaaagaaaaggggggattggggggtacagtgcaggggaaagaatagtagacataatagcaacagacatacaaactaaag

SEQ ID NO: 19409 - DNA, 301 bp, Artificial Sequence
  Trim72.2_NTC.33
  crRNA array
  misc_feature (148)..(157): n is a, c, g, or t
cttggctttatatatcttgtggaaaggacgaaacaccgtaatttctactaagtgtagatcacgagcgtctgcccgggcctaatttctactaagtgtagattaagcgaccgacgcattcgctaatttctactaagtgtagatttttttnnnnnnnnnnaagcttggcgtggatccgatatcaactagatcttgagacaaatggcagtattcatccacaattttaaaagaaaaggggggattggggggtacagtgcaggggaaagaatagtagacataatagcaacagacatacaaactaaag

SEQ ID NO: 19410 - DNA, 301 bp, Artificial Sequence
  Trim72.2_NTC.34
  crRNA array
  misc_feature (148)..(157): n is a, c, g, or t
cttggctttatatatcttgtggaaaggacgaaacaccgtaatttctactaagtgtagatcacgagcgtctgcccgggcctaatttctactaagtgtagattagcgttcgacacgtgaaactaatttctactaagtgtagatttttttnnnnnnnnnnaagcttggcgtggatccgatatcaactagatcttgagacaaatggcagtattcatccacaattttaaaagaaaaggggggattggggggtacagtgcaggggaaagaatagtagacataatagcaacagacatacaaactaaag

SEQ ID NO: 19411 - DNA, 301 bp, Artificial Sequence
  Trim72.2_NTC.35
  crRNA array
  misc_feature (148)..(157): n is a, c, g, or t
cttggctttatatatcttgtggaaaggacgaaacaccgtaatttctactaagtgtagatcacgagcgtctgcccgggcctaatttctactaagtgtagattggcgcgtaatcgctattcgtaatttctactaagtgtagatttttttnnnnnnnnnnaagcttggcgtggatccgatatcaactagatcttgagacaaatggcagtattcatccacaattttaaaagaaaaggggggattggggggtacagtgcaggggaaagaatagtagacataatagcaacagacatacaaactaaag

SEQ ID NO: 19412 - DNA, 301 bp, Artificial Sequence
  Trim72.2_NTC.36
  crRNA array
  misc_feature (148)..(157): n is a, c, g, or t
cttggctttatatatcttgtggaaaggacgaaacaccgtaatttctactaagtgtagatcacgagcgtctgcccgggcctaatttctactaagtgtagatcaacccgccgtagcgggccttaatttctactaagtgtagatttttttnnnnnnnnnnaagcttggcgtggatccgatatcaactagatcttgagacaaatggcagtattcatccacaattttaaaagaaaaggggggattggggggtacagtgcaggggaaagaatagtagacataatagcaacagacatacaaactaaag

SEQ ID NO: 19413 - DNA, 301 bp, Artificial Sequence
  Trim72.2_NTC.37
  crRNA array
  misc_feature (148)..(157): n is a, c, g, or t
cttggctttatatatcttgtggaaaggacgaaacaccgtaatttctactaagtgtagatcacgagcgtctgcccgggcctaatttctactaagtgtagattttgcgttgacgcgattacttaatttctactaagtgtagatttttttnnnnnnnnnnaagcttggcgtggatccgatatcaactagatcttgagacaaatggcagtattcatccacaattttaaaagaaaaggggggattggggggtacagtgcaggggaaagaatagtagacataatagcaacagacatacaaactaaag

SEQ ID NO: 19414 - DNA, 301 bp, Artificial Sequence
  Trim72.2_NTC.38
  crRNA array
  misc_feature (148)..(157): n is a, c, g, or t
cttggctttatatatcttgtggaaaggacgaaacaccgtaatttctactaagtgtagatcacgagcgtctgcccgggcctaatttctactaagtgtagataacggagcgcgatactaccataatttctactaagtgtagatttttttnnnnnnnnnnaagcttggcgtggatccgatatcaactagatcttgagacaaatggcagtattcatccacaattttaaaagaaaaggggggattggggggtacagtgcaggggaaagaatagtagacataatagcaacagacatacaaactaaag

SEQ ID NO: 19415 - DNA, 301 bp, Artificial Sequence
  Trim72.2_NTC.39
  crRNA array
  misc_feature (148)..(157): n is a, c, g, or t
cttggctttatatatcttgtggaaaggacgaaacaccgtaatttctactaagtgtagatcacgagcgtctgcccgggcctaatttctactaagtgtagatccggacgttataacgtttcttaatttctactaagtgtagatttttttnnnnnnnnnnaagcttggcgtggatccgatatcaactagatcttgagacaaatggcagtattcatccacaattttaaaagaaaaggggggattggggggtacagtgcaggggaaagaatagtagacataatagcaacagacatacaaactaaag

SEQ ID NO: 19416 - DNA, 301 bp, Artificial Sequence
  Trim72.2_NTC.4
  crRNA array
  misc_feature (148)..(157): n is a, c, g, or t
cttggctttatatatcttgtggaaaggacgaaacaccgtaatttctactaagtgtagatcacgagcgtctgcccgggcctaatttctactaagtgtagatatacccgtcgcgaacgtgagtaatttctactaagtgtagatttttttnnnnnnnnnnaagcttggcgtggatccgatatcaactagatcttgagacaaatggcagtattcatccacaattttaaaagaaaaggggggattggggggtacagtgcaggggaaagaatagtagacataatagcaacagacatacaaactaaag

SEQ ID NO: 19417 - DNA, 301 bp, Artificial Sequence
  Trim72.2_NTC.40
  crRNA array
  misc_feature (148)..(157): n is a, c, g, or t
cttggctttatatatcttgtggaaaggacgaaacaccgtaatttctactaagtgtagatcacgagcgtctgcccgggcctaatttctactaagtgtagatattcgcgaacccggccggaataatttctactaagtgtagatttttttnnnnnnnnnnaagcttggcgtggatccgatatcaactagatcttgagacaaatggcagtattcatccacaattttaaaagaaaaggggggattggggggtacagtgcaggggaaagaatagtagacataatagcaacagacatacaaactaaag

SEQ ID NO: 19418 - DNA, 301 bp, Artificial Sequence
  Trim72.2_NTC.41
  crRNA array
  misc_feature (148)..(157): n is a, c, g, or t
cttggctttatatatcttgtggaaaggacgaaacaccgtaatttctactaagtgtagatcacgagcgtctgcccgggcctaatttctactaagtgtagatttgatggcgcgacgcgttattaatttctactaagtgtagatttttttnnnnnnnnnnaagcttggcgtggatccgatatcaactagatcttgagacaaatggcagtattcatccacaattttaaaagaaaaggggggattggggggtacagtgcaggggaaagaatagtagacataatagcaacagacatacaaactaaag

SEQ ID NO: 19419 - DNA, 301 bp, Artificial Sequence
  Trim72.2_NTC.42
  crRNA array
  misc_feature (148)..(157): n is a, c, g, or t
cttggctttatatatcttgtggaaaggacgaaacaccgtaatttctactaagtgtagatcacgagcgtctgcccgggcctaatttctactaagtgtagatggtcaaatcgcggcgataactaatttctactaagtgtagatttttttnnnnnnnnnnaagcttggcgtggatccgatatcaactagatcttgagacaaatggcagtattcatccacaattttaaaagaaaaggggggattggggggtacagtgcaggggaaagaatagtagacataatagcaacagacatacaaactaaag

SEQ ID NO: 19420 - DNA, 301 bp, Artificial Sequence
  Trim72.2_NTC.43
  crRNA array
  misc_feature (148)..(157): n is a, c, g, or t
cttggctttatatatcttgtggaaaggacgaaacaccgtaatttctactaagtgtagatcacgagcgtctgcccgggcctaatttctactaagtgtagatcgactcgcgcattgaactggtaatttctactaagtgtagatttttttnnnnnnnnnnaagcttggcgtggatccgatatcaactagatcttgagacaaatggcagtattcatccacaattttaaaagaaaaggggggattggggggtacagtgcaggggaaagaatagtagacataatagcaacagacatacaaactaaag

SEQ ID NO: 19421 - DNA, 301 bp, Artificial Sequence
  Trim72.2_NTC.44
  crRNA array
  misc_feature (148)..(157): n is a, c, g, or t
cttggctttatatatcttgtggaaaggacgaaacaccgtaatttctactaagtgtagatcacgagcgtctgcccgggcctaatttctactaagtgtagatagcgtcgtacgatttatcgttaatttctactaagtgtagatttttttnnnnnnnnnnaagcttggcgtggatccgatatcaactagatcttgagacaaatggcagtattcatccacaattttaaaagaaaaggggggattggggggtacagtgcaggggaaagaatagtagacataatagcaacagacatacaaactaaag

SEQ ID NO: 19422 - DNA, 301 bp, Artificial Sequence
  Trim72.2_NTC.45
  crRNA array
  misc_feature (148)..(157): n is a, c, g, or t
cttggctttatatatcttgtggaaaggacgaaacaccgtaatttctactaagtgtagatcacgagcgtctgcccgggcctaatttctactaagtgtagatcggaacgcgtgatactagggtaatttctactaagtgtagatttttttnnnnnnnnnnaagcttggcgtggatccgatatcaactagatcttgagacaaatggcagtattcatccacaattttaaaagaaaaggggggattggggggtacagtgcaggggaaagaatagtagacataatagcaacagacatacaaactaaag

SEQ ID NO: 19423 - DNA, 301 bp, Artificial Sequence
  Trim72.2_NTC.46
  crRNA array
  misc_feature (148)..(157): n is a, c, g, or t
cttggctttatatatcttgtggaaaggacgaaacaccgtaatttctactaagtgtagatcacgagcgtctgcccgggcctaatttctactaagtgtagatagcgggtcgtagacgcgcggtaatttctactaagtgtagatttttttnnnnnnnnnnaagcttggcgtggatccgatatcaactagatcttgagacaaatggcagtattcatccacaattttaaaagaaaaggggggattggggggtacagtgcaggggaaagaatagtagacataatagcaacagacatacaaactaaag

SEQ ID NO: 19424 - DNA, 301 bp, Artificial Sequence
  Trim72.2_NTC.47
  crRNA array
  misc_feature (148)..(157): n is a, c, g, or t
cttggctttatatatcttgtggaaaggacgaaacaccgtaatttctactaagtgtagatcacgagcgtctgcccgggcctaatttctactaagtgtagattctcgtatcgcgattgttaataatttctactaagtgtagatttttttnnnnnnnnnnaagcttggcgtggatccgatatcaactagatcttgagacaaatggcagtattcatccacaattttaaaagaaaaggggggattggggggtacagtgcaggggaaagaatagtagacataatagcaacagacatacaaactaaag

SEQ ID NO: 19425 - DNA, 301 bp, Artificial Sequence
  Trim72.2_NTC.48
  crRNA array
  misc_feature (148)..(157): n is a, c, g, or t
cttggctttatatatcttgtggaaaggacgaaacaccgtaatttctactaagtgtagatcacgagcgtctgcccgggcctaatttctactaagtgtagatcggtcgactacggctgttagtaatttctactaagtgtagatttttttnnnnnnnnnnaagcttggcgtggatccgatatcaactagatcttgagacaaatggcagtattcatccacaattttaaaagaaaaggggggattggggggtacagtgcaggggaaagaatagtagacataatagcaacagacatacaaactaaag

SEQ ID NO: 19426 - DNA, 301 bp, Artificial Sequence
  Trim72.2_NTC.49
  crRNA array
  misc_feature (148)..(157): n is a, c, g, or t
cttggctttatatatcttgtggaaaggacgaaacaccgtaatttctactaagtgtagatcacgagcgtctgcccgggcctaatttctactaagtgtagattcggggcgcgtcaactgaattaatttctactaagtgtagatttttttnnnnnnnnnnaagcttggcgtggatccgatatcaactagatcttgagacaaatggcagtattcatccacaattttaaaagaaaaggggggattggggggtacagtgcaggggaaagaatagtagacataatagcaacagacatacaaactaaag

SEQ ID NO: 19427 - DNA, 301 bp, Artificial Sequence
  Trim72.2_NTC.5
  crRNA array
  misc_feature (148)..(157): n is a, c, g, or t
cttggctttatatatcttgtggaaaggacgaaacaccgtaatttctactaagtgtagatcacgagcgtctgcccgggcctaatttctactaagtgtagatgcttacgcgtcgcgaatgtataatttctactaagtgtagatttttttnnnnnnnnnnaagcttggcgtggatccgatatcaactagatcttgagacaaatggcagtattcatccacaattttaaaagaaaaggggggattggggggtacagtgcaggggaaagaatagtagacataatagcaacagacatacaaactaaag

SEQ ID NO: 19428 - DNA, 301 bp, Artificial Sequence
  Trim72.2_NTC.50
  crRNA array
  misc_feature (148)..(157): n is a, c, g, or t
cttggctttatatatcttgtggaaaggacgaaacaccgtaatttctactaagtgtagatcacgagcgtctgcccgggcctaatttctactaagtgtagatattgccgctcgcgcaaaatctaatttctactaagtgtagatttttttnnnnnnnnnnaagcttggcgtggatccgatatcaactagatcttgagacaaatggcagtattcatccacaattttaaaagaaaaggggggattggggggtacagtgcaggggaaagaatagtagacataatagcaacagacatacaaactaaag

SEQ ID NO: 19429 - DNA, 301 bp, Artificial Sequence
  Trim72.2_NTC.51
  crRNA array
  misc_feature (148)..(157): n is a, c, g, or t
cttggctttatatatcttgtggaaaggacgaaacaccgtaatttctactaagtgtagatcacgagcgtctgcccgggcctaatttctactaagtgtagattaacgcgcaacacgccaatgtaatttctactaagtgtagatttttttnnnnnnnnnnaagcttggcgtggatccgatatcaactagatcttgagacaaatggcagtattcatccacaattttaaaagaaaaggggggattggggggtacagtgcaggggaaagaatagtagacataatagcaacagacatacaaactaaag

SEQ ID NO: 19430 - DNA, 301 bp, Artificial Sequence
  Trim72.2_NTC.6
  crRNA array
  misc_feature (148)..(157): n is a, c, g, or t
cttggctttatatatcttgtggaaaggacgaaacaccgtaatttctactaagtgtagatcacgagcgtctgcccgggcctaatttctactaagtgtagatcgaatcgcgcctacgggaattaatttctactaagtgtagatttttttnnnnnnnnnnaagcttggcgtggatccgatatcaactagatcttgagacaaatggcagtattcatccacaattttaaaagaaaaggggggattggggggtacagtgcaggggaaagaatagtagacataatagcaacagacatacaaactaaag

SEQ ID NO: 19431 - DNA, 301 bp, Artificial Sequence
  Trim72.2_NTC.7
  crRNA array
  misc_feature (148)..(157): n is a, c, g, or t
cttggctttatatatcttgtggaaaggacgaaacaccgtaatttctactaagtgtagatcacgagcgtctgcccgggcctaatttctactaagtgtagatcgccgaacggataagactattaatttctactaagtgtagatttttttnnnnnnnnnnaagcttggcgtggatccgatatcaactagatcttgagacaaatggcagtattcatccacaattttaaaagaaaaggggggattggggggtacagtgcaggggaaagaatagtagacataatagcaacagacatacaaactaaag

SEQ ID NO: 19432 - DNA, 301 bp, Artificial Sequence
  Trim72.2_NTC.8
  crRNA array
  misc_feature (148)..(157): n is a, c, g, or t
cttggctttatatatcttgtggaaaggacgaaacaccgtaatttctactaagtgtagatcacgagcgtctgcccgggcctaatttctactaagtgtagatcgaccgaggttacgctgggataatttctactaagtgtagatttttttnnnnnnnnnnaagcttggcgtggatccgatatcaactagatcttgagacaaatggcagtattcatccacaattttaaaagaaaaggggggattggggggtacagtgcaggggaaagaatagtagacataatagcaacagacatacaaactaaag

SEQ ID NO: 19433 - DNA, 301 bp, Artificial Sequence
  Trim72.2_NTC.9
  crRNA array
  misc_feature (148)..(157): n is a, c, g, or t
cttggctttatatatcttgtggaaaggacgaaacaccgtaatttctactaagtgtagatcacgagcgtctgcccgggcctaatttctactaagtgtagatatcgccgtacggctatggcataatttctactaagtgtagatttttttnnnnnnnnnnaagcttggcgtggatccgatatcaactagatcttgagacaaatggcagtattcatccacaattttaaaagaaaaggggggattggggggtacagtgcaggggaaagaatagtagacataatagcaacagacatacaaactaaag

SEQ ID NO: 19434 - DNA, 301 bp, Artificial Sequence
  Trim72.3_NTC.0
  crRNA array
  misc_feature (148)..(157): n is a, c, g, or t
cttggctttatatatcttgtggaaaggacgaaacaccgtaatttctactaagtgtagatacgtgtgctggcacgacaagtaatttctactaagtgtagattatagcgtcgcgcgctaatttaatttctactaagtgtagatttttttnnnnnnnnnnaagcttggcgtggatccgatatcaactagatcttgagacaaatggcagtattcatccacaattttaaaagaaaaggggggattggggggtacagtgcaggggaaagaatagtagacataatagcaacagacatacaaactaaag

SEQ ID NO: 19435 - DNA, 301 bp, Artificial Sequence
  Trim72.3_NTC.1
  crRNA array
  misc_feature (148)..(157): n is a, c, g, or t
cttggctttatatatcttgtggaaaggacgaaacaccgtaatttctactaagtgtagatacgtgtgctggcacgacaagtaatttctactaagtgtagatcgcgtaaccgttccggctcctaatttctactaagtgtagatttttttnnnnnnnnnnaagcttggcgtggatccgatatcaactagatcttgagacaaatggcagtattcatccacaattttaaaagaaaaggggggattggggggtacagtgcaggggaaagaatagtagacataatagcaacagacatacaaactaaag

SEQ ID NO: 19436 - DNA, 301 bp, Artificial Sequence
  Trim72.3_NTC.10
  crRNA array
  misc_feature (148)..(157): n is a, c, g, or t
cttggctttatatatcttgtggaaaggacgaaacaccgtaatttctactaagtgtagatacgtgtgctggcacgacaagtaatttctactaagtgtagatcgctaagttcgcgcgggccgtaatttctactaagtgtagatttttttnnnnnnnnnnaagcttggcgtggatccgatatcaactagatcttgagacaaatggcagtattcatccacaattttaaaagaaaaggggggattggggggtacagtgcaggggaaagaatagtagacataatagcaacagacatacaaactaaag

SEQ ID NO: 19437 - DNA, 301 bp, Artificial Sequence
  Trim72.3_NTC.11
  crRNA array
  misc_feature (148)..(157): n is a, c, g, or t
cttggctttatatatcttgtggaaaggacgaaacaccgtaatttctactaagtgtagatacgtgtgctggcacgacaagtaatttctactaagtgtagatcgttcgtcgacgaagcaatctaatttctactaagtgtagatttttttnnnnnnnnnnaagcttggcgtggatccgatatcaactagatcttgagacaaatggcagtattcatccacaattttaaaagaaaaggggggattggggggtacagtgcaggggaaagaatagtagacataatagcaacagacatacaaactaaag

SEQ ID NO: 19438 - DNA, 301 bp, Artificial Sequence
  Trim72.3_NTC.12
  crRNA array
  misc_feature (148)..(157): n is a, c, g, or t
cttggctttatatatcttgtggaaaggacgaaacaccgtaatttctactaagtgtagatacgtgtgctggcacgacaagtaatttctactaagtgtagatcgccgacgattaatcaatagtaatttctactaagtgtagatttttttnnnnnnnnnnaagcttggcgtggatccgatatcaactagatcttgagacaaatggcagtattcatccacaattttaaaagaaaaggggggattggggggtacagtgcaggggaaagaatagtagacataatagcaacagacatacaaactaaag

SEQ ID NO: 19439 - DNA, 301 bp, Artificial Sequence
  Trim72.3_NTC.13
  crRNA array
  misc_feature (148)..(157): n is a, c, g, or t
cttggctttatatatcttgtggaaaggacgaaacaccgtaatttctactaagtgtagatacgtgtgctggcacgacaagtaatttctactaagtgtagatgaccgttgtatcgcgatcaataatttctactaagtgtagatttttttnnnnnnnnnnaagcttggcgtggatccgatatcaactagatcttgagacaaatggcagtattcatccacaattttaaaagaaaaggggggattggggggtacagtgcaggggaaagaatagtagacataatagcaacagacatacaaactaaag

SEQ ID NO: 19440 - DNA, 301 bp, Artificial Sequence
  Trim72.3_NTC.14
  crRNA array
  misc_feature (148)..(157): n is a, c, g, or t
cttggctttatatatcttgtggaaaggacgaaacaccgtaatttctactaagtgtagatacgtgtgctggcacgacaagtaatttctactaagtgtagatccgttcgtgcgatagtgttttaatttctactaagtgtagatttttttnnnnnnnnnnaagcttggcgtggatccgatatcaactagatcttgagacaaatggcagtattcatccacaattttaaaagaaaaggggggattggggggtacagtgcaggggaaagaatagtagacataatagcaacagacatacaaactaaag

SEQ ID NO: 19441 - DNA, 301 bp, Artificial Sequence
  Trim72.3_NTC.15
  crRNA array
  misc_feature (148)..(157): n is a, c, g, or t
cttggctttatatatcttgtggaaaggacgaaacaccgtaatttctactaagtgtagatacgtgtgctggcacgacaagtaatttctactaagtgtagatgttgtcgtgccgcgaatttataatttctactaagtgtagatttttttnnnnnnnnnnaagcttggcgtggatccgatatcaactagatcttgagacaaatggcagtattcatccacaattttaaaagaaaaggggggattggggggtacagtgcaggggaaagaatagtagacataatagcaacagacatacaaactaaag

SEQ ID NO: 19442 - DNA, 301 bp, Artificial Sequence
  Trim72.3_NTC.16
  crRNA array
  misc_feature (148)..(157): n is a, c, g, or t
cttggctttatatatcttgtggaaaggacgaaacaccgtaatttctactaagtgtagatacgtgtgctggcacgacaagtaatttctactaagtgtagatcggtacgttagacgaaaatttaatttctactaagtgtagatttttttnnnnnnnnnnaagcttggcgtggatccgatatcaactagatcttgagacaaatggcagtattcatccacaattttaaaagaaaaggggggattggggggtacagtgcaggggaaagaatagtagacataatagcaacagacatacaaactaaag

SEQ ID NO: 19443 - DNA, 301 bp, Artificial Sequence
  Trim72.3_NTC.17
  crRNA array
  misc_feature (148)..(157): n is a, c, g, or t
cttggctttatatatcttgtggaaaggacgaaacaccgtaatttctactaagtgtagatacgtgtgctggcacgacaagtaatttctactaagtgtagattatcgaacgctatcgaacgttaatttctactaagtgtagatttttttnnnnnnnnnnaagcttggcgtggatccgatatcaactagatcttgagacaaatggcagtattcatccacaattttaaaagaaaaggggggattggggggtacagtgcaggggaaagaatagtagacataatagcaacagacatacaaactaaag

SEQ ID NO: 19444 - DNA, 301 bp, Artificial Sequence
  Trim72.3_NTC.18
  crRNA array
  misc_feature (148)..(157): n is a, c, g, or t
cttggctttatatatcttgtggaaaggacgaaacaccgtaatttctactaagtgtagatacgtgtgctggcacgacaagtaatttctactaagtgtagattccggttacgaccggcaaaataatttctactaagtgtagatttttttnnnnnnnnnnaagcttggcgtggatccgatatcaactagatcttgagacaaatggcagtattcatccacaattttaaaagaaaaggggggattggggggtacagtgcaggggaaagaatagtagacataatagcaacagacatacaaactaaag

SEQ ID NO: 19445 - DNA, 301 bp, Artificial Sequence
  Trim72.3_NTC.19
  crRNA array
  misc_feature (148)..(157): n is a, c, g, or t
cttggctttatatatcttgtggaaaggacgaaacaccgtaatttctactaagtgtagatacgtgtgctggcacgacaagtaatttctactaagtgtagatcgtcgtagaacgatacccgataatttctactaagtgtagatttttttnnnnnnnnnnaagcttggcgtggatccgatatcaactagatcttgagacaaatggcagtattcatccacaattttaaaagaaaaggggggattggggggtacagtgcaggggaaagaatagtagacataatagcaacagacatacaaactaaag

SEQ ID NO: 19446 - DNA, 301 bp, Artificial Sequence
  Trim72.3_NTC.2
  crRNA array
  misc_feature (148)..(157): n is a, c, g, or t
cttggctttatatatcttgtggaaaggacgaaacaccgtaatttctactaagtgtagatacgtgtgctggcacgacaagtaatttctactaagtgtagatttatgtcgcgccgcgacccgtaatttctactaagtgtagatttttttnnnnnnnnnnaagcttggcgtggatccgatatcaactagatcttgagacaaatggcagtattcatccacaattttaaaagaaaaggggggattggggggtacagtgcaggggaaagaatagtagacataatagcaacagacatacaaactaaag

SEQ ID NO: 19447 - DNA, 301 bp, Artificial Sequence
  Trim72.3_NTC.20
  crRNA array
  misc_feature (148)..(157): n is a, c, g, or t
cttggctttatatatcttgtggaaaggacgaaacaccgtaatttctactaagtgtagatacgtgtgctggcacgacaagtaatttctactaagtgtagatattccggcgcgaccagaagataatttctactaagtgtagatttttttnnnnnnnnnnaagcttggcgtggatccgatatcaactagatcttgagacaaatggcagtattcatccacaattttaaaagaaaaggggggattggggggtacagtgcaggggaaagaatagtagacataatagcaacagacatacaaactaaag

SEQ ID NO: 19448 - DNA, 301 bp, Artificial Sequence
  Trim72.3_NTC.21
  crRNA array
  misc_feature (148)..(157): n is a, c, g, or t
cttggctttatatatcttgtggaaaggacgaaacaccgtaatttctactaagtgtagatacgtgtgctggcacgacaagtaatttctactaagtgtagatgtataacttcgcgcggtccgtaatttctactaagtgtagatttttttnnnnnnnnnnaagcttggcgtggatccgatatcaactagatcttgagacaaatggcagtattcatccacaattttaaaagaaaaggggggattggggggtacagtgcaggggaaagaatagtagacataatagcaacagacatacaaactaaag

SEQ ID NO: 19449 - DNA, 301 bp, Artificial Sequence
  Trim72.3_NTC.22
  crRNA array
  misc_feature (148)..(157): n is a, c, g, or t
cttggctttatatatcttgtggaaaggacgaaacaccgtaatttctactaagtgtagatacgtgtgctggcacgacaagtaatttctactaagtgtagatgcgcgtcaacgtaatgtgcctaatttctactaagtgtagatttttttnnnnnnnnnnaagcttggcgtggatccgatatcaactagatcttgagacaaatggcagtattcatccacaattttaaaagaaaaggggggattggggggtacagtgcaggggaaagaatagtagacataatagcaacagacatacaaactaaag

SEQ ID NO: 19450 - DNA, 301 bp, Artificial Sequence
  Trim72.3_NTC.23
  crRNA array
  misc_feature (148)..(157): n is a, c, g, or t
cttggctttatatatcttgtggaaaggacgaaacaccgtaatttctactaagtgtagatacgtgtgctggcacgacaagtaatttctactaagtgtagatacgcgctattatcgtaggtgtaatttctactaagtgtagatttttttnnnnnnnnnnaagcttggcgtggatccgatatcaactagatcttgagacaaatggcagtattcatccacaattttaaaagaaaaggggggattggggggtacagtgcaggggaaagaatagtagacataatagcaacagacatacaaactaaag

SEQ ID NO: 19451 - DNA, 301 bp, Artificial Sequence
  Trim72.3_NTC.24
  crRNA array
  misc_feature (148)..(157): n is a, c, g, or t
cttggctttatatatcttgtggaaaggacgaaacaccgtaatttctactaagtgtagatacgtgtgctggcacgacaagtaatttctactaagtgtagatactatcgacgttcgtcccggtaatttctactaagtgtagatttttttnnnnnnnnnnaagcttggcgtggatccgatatcaactagatcttgagacaaatggcagtattcatccacaattttaaaagaaaaggggggattggggggtacagtgcaggggaaagaatagtagacataatagcaacagacatacaaactaaag

SEQ ID NO: 19452 - DNA, 301 bp, Artificial Sequence
  Trim72.3_NTC.25
  crRNA array
  misc_feature (148)..(157): n is a, c, g, or t
cttggctttatatatcttgtggaaaggacgaaacaccgtaatttctactaagtgtagatacgtgtgctggcacgacaagtaatttctactaagtgtagattcgcgttatcgtgccgtgcgtaatttctactaagtgtagatttttttnnnnnnnnnnaagcttggcgtggatccgatatcaactagatcttgagacaaatggcagtattcatccacaattttaaaagaaaaggggggattggggggtacagtgcaggggaaagaatagtagacataatagcaacagacatacaaactaaag

SEQ ID NO: 19453 - DNA, 301 bp, Artificial Sequence
  Trim72.3_NTC.26
  crRNA array
  misc_feature (148)..(157): n is a, c, g, or t
cttggctttatatatcttgtggaaaggacgaaacaccgtaatttctactaagtgtagatacgtgtgctggcacgacaagtaatttctactaagtgtagatcgcgacggcggttttaacactaatttctactaagtgtagatttttttnnnnnnnnnnaagcttggcgtggatccgatatcaactagatcttgagacaaatggcagtattcatccacaattttaaaagaaaaggggggattggggggtacagtgcaggggaaagaatagtagacataatagcaacagacatacaaactaaag

SEQ ID NO: 19454 - DNA, 301 bp, Artificial Sequence
  Trim72.3_NTC.27
  crRNA array
  misc_feature (148)..(157): n is a, c, g, or t
cttggctttatatatcttgtggaaaggacgaaacaccgtaatttctactaagtgtagatacgtgtgctggcacgacaagtaatttctactaagtgtagatgtcgcgttgcgaccggcgcttaatttctactaagtgtagatttttttnnnnnnnnnnaagcttggcgtggatccgatatcaactagatcttgagacaaatggcagtattcatccacaattttaaaagaaaaggggggattggggggtacagtgcaggggaaagaatagtagacataatagcaacagacatacaaactaaag

SEQ ID NO: 19455 - DNA, 301 bp, Artificial Sequence
  Trim72.3_NTC.28
  crRNA array
  misc_feature (148)..(157): n is a, c, g, or t
cttggctttatatatcttgtggaaaggacgaaacaccgtaatttctactaagtgtagatacgtgtgctggcacgacaagtaatttctactaagtgtagataccgctaatcggcgtaaacttaatttctactaagtgtagatttttttnnnnnnnnnnaagcttggcgtggatccgatatcaactagatcttgagacaaatggcagtattcatccacaattttaaaagaaaaggggggattggggggtacagtgcaggggaaagaatagtagacataatagcaacagacatacaaactaaag

SEQ ID NO: 19456 - DNA, 301 bp, Artificial Sequence
  Trim72.3_NTC.29
  crRNA array
  misc_feature (148)..(157): n is a, c, g, or t
cttggctttatatatcttgtggaaaggacgaaacaccgtaatttctactaagtgtagatacgtgtgctggcacgacaagtaatttctactaagtgtagatcgcgatctataccgtctatataatttctactaagtgtagatttttttnnnnnnnnnnaagcttggcgtggatccgatatcaactagatcttgagacaaatggcagtattcatccacaattttaaaagaaaaggggggattggggggtacagtgcaggggaaagaatagtagacataatagcaacagacatacaaactaaag

SEQ ID NO: 19457 - DNA, 301 bp, Artificial Sequence
  Trim72.3_NTC.3
  crRNA array
  misc_feature (148)..(157): n is a, c, g, or t
cttggctttatatatcttgtggaaaggacgaaacaccgtaatttctactaagtgtagatacgtgtgctggcacgacaagtaatttctactaagtgtagattcgacgcgagacgacgtacataatttctactaagtgtagatttttttnnnnnnnnnnaagcttggcgtggatccgatatcaactagatcttgagacaaatggcagtattcatccacaattttaaaagaaaaggggggattggggggtacagtgcaggggaaagaatagtagacataatagcaacagacatacaaactaaag

SEQ ID NO: 19458 - DNA, 301 bp, Artificial Sequence
  Trim72.3_NTC.30
  crRNA array
  misc_feature (148)..(157): n is a, c, g, or t
cttggctttatatatcttgtggaaaggacgaaacaccgtaatttctactaagtgtagatacgtgtgctggcacgacaagtaatttctactaagtgtagatcgatcgtacgggtgtcctaataatttctactaagtgtagatttttttnnnnnnnnnnaagcttggcgtggatccgatatcaactagatcttgagacaaatggcagtattcatccacaattttaaaagaaaaggggggattggggggtacagtgcaggggaaagaatagtagacataatagcaacagacatacaaactaaag

SEQ ID NO: 19459 - DNA, 301 bp, Artificial Sequence
  Trim72.3_NTC.31
  crRNA array
  misc_feature (148)..(157): n is a, c, g, or t
cttggctttatatatcttgtggaaaggacgaaacaccgtaatttctactaagtgtagatacgtgtgctggcacgacaagtaatttctactaagtgtagatgccgaccgcgtgattgtaggtaatttctactaagtgtagatttttttnnnnnnnnnnaagcttggcgtggatccgatatcaactagatcttgagacaaatggcagtattcatccacaattttaaaagaaaaggggggattggggggtacagtgcaggggaaagaatagtagacataatagcaacagacatacaaactaaag

SEQ ID NO: 19460 - DNA, 301 bp, Artificial Sequence
  Trim72.3_NTC.32
  crRNA array
  misc_feature (148)..(157): n is a, c, g, or t
cttggctttatatatcttgtggaaaggacgaaacaccgtaatttctactaagtgtagatacgtgtgctggcacgacaagtaatttctactaagtgtagatgcacgttacgcccgggtcactaatttctactaagtgtagatttttttnnnnnnnnnnaagcttggcgtggatccgatatcaactagatcttgagacaaatggcagtattcatccacaattttaaaagaaaaggggggattggggggtacagtgcaggggaaagaatagtagacataatagcaacagacatacaaactaaag

SEQ ID NO: 19461 - DNA, 301 bp, Artificial Sequence
  Trim72.3_NTC.33
  crRNA array
  misc_feature (148)..(157): n is a, c, g, or t
cttggctttatatatcttgtggaaaggacgaaacaccgtaatttctactaagtgtagatacgtgtgctggcacgacaagtaatttctactaagtgtagattaagcgaccgacgcattcgctaatttctactaagtgtagatttttttnnnnnnnnnnaagcttggcgtggatccgatatcaactagatcttgagacaaatggcagtattcatccacaattttaaaagaaaaggggggattggggggtacagtgcaggggaaagaatagtagacataatagcaacagacatacaaactaaag

SEQ ID NO: 19462 - DNA, 301 bp, Artificial Sequence
  Trim72.3_NTC.34
  crRNA array
  misc_feature (148)..(157): n is a, c, g, or t
cttggctttatatatcttgtggaaaggacgaaacaccgtaatttctactaagtgtagatacgtgtgctggcacgacaagtaatttctactaagtgtagattagcgttcgacacgtgaaactaatttctactaagtgtagatttttttnnnnnnnnnnaagcttggcgtggatccgatatcaactagatcttgagacaaatggcagtattcatccacaattttaaaagaaaaggggggattggggggtacagtgcaggggaaagaatagtagacataatagcaacagacatacaaactaaag

SEQ ID NO: 19463 - DNA, 301 bp, Artificial Sequence
  Trim72.3_NTC.35
  crRNA array
  misc_feature (148)..(157): n is a, c, g, or t
cttggctttatatatcttgtggaaaggacgaaacaccgtaatttctactaagtgtagatacgtgtgctggcacgacaagtaatttctactaagtgtagattggcgcgtaatcgctattcgtaatttctactaagtgtagatttttttnnnnnnnnnnaagcttggcgtggatccgatatcaactagatcttgagacaaatggcagtattcatccacaattttaaaagaaaaggggggattggggggtacagtgcaggggaaagaatagtagacataatagcaacagacatacaaactaaag

SEQ ID NO: 19464 - DNA, 301 bp, Artificial Sequence
  Trim72.3_NTC.36
  crRNA array
  misc_feature (148)..(157): n is a, c, g, or t
cttggctttatatatcttgtggaaaggacgaaacaccgtaatttctactaagtgtagatacgtgtgctggcacgacaagtaatttctactaagtgtagatcaacccgccgtagcgggccttaatttctactaagtgtagatttttttnnnnnnnnnnaagcttggcgtggatccgatatcaactagatcttgagacaaatggcagtattcatccacaattttaaaagaaaaggggggattggggggtacagtgcaggggaaagaatagtagacataatagcaacagacatacaaactaaag

SEQ ID NO: 19465 - DNA, 301 bp, Artificial Sequence
  Trim72.3_NTC.37
  crRNA array
  misc_feature (148)..(157): n is a, c, g, or t
cttggctttatatatcttgtggaaaggacgaaacaccgtaatttctactaagtgtagatacgtgtgctggcacgacaagtaatttctactaagtgtagattttgcgttgacgcgattacttaatttctactaagtgtagatttttttnnnnnnnnnnaagcttggcgtggatccgatatcaactagatcttgagacaaatggcagtattcatccacaattttaaaagaaaaggggggattggggggtacagtgcaggggaaagaatagtagacataatagcaacagacatacaaactaaag

SEQ ID NO: 19466 - DNA, 301 bp, Artificial Sequence
  Trim72.3_NTC.38
  crRNA array
  misc_feature (148)..(157): n is a, c, g, or t
cttggctttatatatcttgtggaaaggacgaaacaccgtaatttctactaagtgtagatacgtgtgctggcacgacaagtaatttctactaagtgtagataacggagcgcgatactaccataatttctactaagtgtagatttttttnnnnnnnnnnaagcttggcgtggatccgatatcaactagatcttgagacaaatggcagtattcatccacaattttaaaagaaaaggggggattggggggtacagtgcaggggaaagaatagtagacataatagcaacagacatacaaactaaag

SEQ ID NO: 19467 - DNA, 301 bp, Artificial Sequence
  Trim72.3_NTC.39
  crRNA array
  misc_feature (148)..(157): n is a, c, g, or t
cttggctttatatatcttgtggaaaggacgaaacaccgtaatttctactaagtgtagatacgtgtgctggcacgacaagtaatttctactaagtgtagatccggacgttataacgtttcttaatttctactaagtgtagatttttttnnnnnnnnnnaagcttggcgtggatccgatatcaactagatcttgagacaaatggcagtattcatccacaattttaaaagaaaaggggggattggggggtacagtgcaggggaaagaatagtagacataatagcaacagacatacaaactaaag

SEQ ID NO: 19468 - DNA, 301 bp, Artificial Sequence
  Trim72.3_NTC.4
  crRNA array
  misc_feature (148)..(157): n is a, c, g, or t
cttggctttatatatcttgtggaaaggacgaaacaccgtaatttctactaagtgtagatacgtgtgctggcacgacaagtaatttctactaagtgtagatatacccgtcgcgaacgtgagtaatttctactaagtgtagatttttttnnnnnnnnnnaagcttggcgtggatccgatatcaactagatcttgagacaaatggcagtattcatccacaattttaaaagaaaaggggggattggggggtacagtgcaggggaaagaatagtagacataatagcaacagacatacaaactaaag

SEQ ID NO: 19469 - DNA, 301 bp, Artificial Sequence
  Trim72.3_NTC.40
  crRNA array
  misc_feature (148)..(157): n is a, c, g, or t
cttggctttatatatcttgtggaaaggacgaaacaccgtaatttctactaagtgtagatacgtgtgctggcacgacaagtaatttctactaagtgtagatattcgcgaacccggccggaataatttctactaagtgtagatttttttnnnnnnnnnnaagcttggcgtggatccgatatcaactagatcttgagacaaatggcagtattcatccacaattttaaaagaaaaggggggattggggggtacagtgcaggggaaagaatagtagacataatagcaacagacatacaaactaaag

SEQ ID NO: 19470 - DNA, 301 bp, Artificial Sequence
  Trim72.3_NTC.41
  crRNA array
  misc_feature (148)..(157): n is a, c, g, or t
cttggctttatatatcttgtggaaaggacgaaacaccgtaatttctactaagtgtagatacgtgtgctggcacgacaagtaatttctactaagtgtagatttgatggcgcgacgcgttattaatttctactaagtgtagatttttttnnnnnnnnnnaagcttggcgtggatccgatatcaactagatcttgagacaaatggcagtattcatccacaattttaaaagaaaaggggggattggggggtacagtgcaggggaaagaatagtagacataatagcaacagacatacaaactaaag

SEQ ID NO: 19471 - DNA, 301 bp, Artificial Sequence
  Trim72.3_NTC.42
  crRNA array
  misc_feature (148)..(157): n is a, c, g, or t
cttggctttatatatcttgtggaaaggacgaaacaccgtaatttctactaagtgtagatacgtgtgctggcacgacaagtaatttctactaagtgtagatggtcaaatcgcggcgataactaatttctactaagtgtagatttttttnnnnnnnnnnaagcttggcgtggatccgatatcaactagatcttgagacaaatggcagtattcatccacaattttaaaagaaaaggggggattggggggtacagtgcaggggaaagaatagtagacataatagcaacagacatacaaactaaag

SEQ ID NO: 19472 - DNA, 301 bp, Artificial Sequence
  Trim72.3_NTC.43
  crRNA array
  misc_feature (148)..(157): n is a, c, g, or t
cttggctttatatatcttgtggaaaggacgaaacaccgtaatttctactaagtgtagatacgtgtgctggcacgacaagtaatttctactaagtgtagatcgactcgcgcattgaactggtaatttctactaagtgtagatttttttnnnnnnnnnnaagcttggcgtggatccgatatcaactagatcttgagacaaatggcagtattcatccacaattttaaaagaaaaggggggattggggggtacagtgcaggggaaagaatagtagacataatagcaacagacatacaaactaaag

SEQ ID NO: 19473 - DNA, 301 bp, Artificial Sequence
  Trim72.3_NTC.44
  crRNA array
  misc_feature (148)..(157): n is a, c, g, or t
cttggctttatatatcttgtggaaaggacgaaacaccgtaatttctactaagtgtagatacgtgtgctggcacgacaagtaatttctactaagtgtagatagcgtcgtacgatttatcgttaatttctactaagtgtagatttttttnnnnnnnnnnaagcttggcgtggatccgatatcaactagatcttgagacaaatggcagtattcatccacaattttaaaagaaaaggggggattggggggtacagtgcaggggaaagaatagtagacataatagcaacagacatacaaactaaag

SEQ ID NO: 19474 - DNA, 301 bp, Artificial Sequence
  Trim72.3_NTC.45
  crRNA array
  misc_feature (148)..(157): n is a, c, g, or t
cttggctttatatatcttgtggaaaggacgaaacaccgtaatttctactaagtgtagatacgtgtgctggcacgacaagtaatttctactaagtgtagatcggaacgcgtgatactagggtaatttctactaagtgtagatttttttnnnnnnnnnnaagcttggcgtggatccgatatcaactagatcttgagacaaatggcagtattcatccacaattttaaaagaaaaggggggattggggggtacagtgcaggggaaagaatagtagacataatagcaacagacatacaaactaaag

SEQ ID NO: 19475 - DNA, 301 bp, Artificial Sequence
  Trim72.3_NTC.46
  crRNA array
  misc_feature (148)..(157): n is a, c, g, or t
cttggctttatatatcttgtggaaaggacgaaacaccgtaatttctactaagtgtagatacgtgtgctggcacgacaagtaatttctactaagtgtagatagcgggtcgtagacgcgcggtaatttctactaagtgtagatttttttnnnnnnnnnnaagcttggcgtggatccgatatcaactagatcttgagacaaatggcagtattcatccacaattttaaaagaaaaggggggattggggggtacagtgcaggggaaagaatagtagacataatagcaacagacatacaaactaaag

SEQ ID NO: 19476 - DNA, 301 bp, Artificial Sequence
  Trim72.3_NTC.47
  crRNA array
  misc_feature (148)..(157): n is a, c, g, or t
cttggctttatatatcttgtggaaaggacgaaacaccgtaatttctactaagtgtagatacgtgtgctggcacgacaagtaatttctactaagtgtagattctcgtatcgcgattgttaataatttctactaagtgtagatttttttnnnnnnnnnnaagcttggcgtggatccgatatcaactagatcttgagacaaatggcagtattcatccacaattttaaaagaaaaggggggattggggggtacagtgcaggggaaagaatagtagacataatagcaacagacatacaaactaaag

SEQ ID NO: 19477 - DNA, 301 bp, Artificial Sequence
  Trim72.3_NTC.48
  crRNA array
  misc_feature (148)..(157): n is a, c, g, or t
cttggctttatatatcttgtggaaaggacgaaacaccgtaatttctactaagtgtagatacgtgtgctggcacgacaagtaatttctactaagtgtagatcggtcgactacggctgttagtaatttctactaagtgtagatttttttnnnnnnnnnnaagcttggcgtggatccgatatcaactagatcttgagacaaatggcagtattcatccacaattttaaaagaaaaggggggattggggggtacagtgcaggggaaagaatagtagacataatagcaacagacatacaaactaaag

SEQ ID NO: 19478 - DNA, 301 bp, Artificial Sequence
  Trim72.3_NTC.49
  crRNA array
  misc_feature (148)..(157): n is a, c, g, or t
cttggctttatatatcttgtggaaaggacgaaacaccgtaatttctactaagtgtagatacgtgtgctggcacgacaagtaatttctactaagtgtagattcggggcgcgtcaactgaattaatttctactaagtgtagatttttttnnnnnnnnnnaagcttggcgtggatccgatatcaactagatcttgagacaaatggcagtattcatccacaattttaaaagaaaaggggggattggggggtacagtgcaggggaaagaatagtagacataatagcaacagacatacaaactaaag

SEQ ID NO: 19479 - DNA, 301 bp, Artificial Sequence
  Trim72.3_NTC.5
  crRNA array
  misc_feature (148)..(157): n is a, c, g, or t
cttggctttatatatcttgtggaaaggacgaaacaccgtaatttctactaagtgtagatacgtgtgctggcacgacaagtaatttctactaagtgtagatgcttacgcgtcgcgaatgtataatttctactaagtgtagatttttttnnnnnnnnnnaagcttggcgtggatccgatatcaactagatcttgagacaaatggcagtattcatccacaattttaaaagaaaaggggggattggggggtacagtgcaggggaaagaatagtagacataatagcaacagacatacaaactaaag

SEQ ID NO: 19480 - DNA, 301 bp, Artificial Sequence
  Trim72.3_NTC.50
  crRNA array
  misc_feature (148)..(157): n is a, c, g, or t
cttggctttatatatcttgtggaaaggacgaaacaccgtaatttctactaagtgtagatacgtgtgctggcacgacaagtaatttctactaagtgtagatattgccgctcgcgcaaaatctaatttctactaagtgtagatttttttnnnnnnnnnnaagcttggcgtggatccgatatcaactagatcttgagacaaatggcagtattcatccacaattttaaaagaaaaggggggattggggggtacagtgcaggggaaagaatagtagacataatagcaacagacatacaaactaaag

SEQ ID NO: 19481 - DNA, 301 bp, Artificial Sequence
  Trim72.3_NTC.51
  crRNA array
  misc_feature (148)..(157): n is a, c, g, or t
cttggctttatatatcttgtggaaaggacgaaacaccgtaatttctactaagtgtagatacgtgtgctggcacgacaagtaatttctactaagtgtagattaacgcgcaacacgccaatgtaatttctactaagtgtagatttttttnnnnnnnnnnaagcttggcgtggatccgatatcaactagatcttgagacaaatggcagtattcatccacaattttaaaagaaaaggggggattggggggtacagtgcaggggaaagaatagtagacataatagcaacagacatacaaactaaag

SEQ ID NO: 19482 - DNA, 301 bp, Artificial Sequence
  Trim72.3_NTC.6
  crRNA array
  misc_feature (148)..(157): n is a, c, g, or t
cttggctttatatatcttgtggaaaggacgaaacaccgtaatttctactaagtgtagatacgtgtgctggcacgacaagtaatttctactaagtgtagatcgaatcgcgcctacgggaattaatttctactaagtgtagatttttttnnnnnnnnnnaagcttggcgtggatccgatatcaactagatcttgagacaaatggcagtattcatccacaattttaaaagaaaaggggggattggggggtacagtgcaggggaaagaatagtagacataatagcaacagacatacaaactaaag

SEQ ID NO: 19483 - DNA, 301 bp, Artificial Sequence
  Trim72.3_NTC.7
  crRNA array
  misc_feature (148)..(157): n is a, c, g, or t
cttggctttatatatcttgtggaaaggacgaaacaccgtaatttctactaagtgtagatacgtgtgctggcacgacaagtaatttctactaagtgtagatcgccgaacggataagactattaatttctactaagtgtagatttttttnnnnnnnnnnaagcttggcgtggatccgatatcaactagatcttgagacaaatggcagtattcatccacaattttaaaagaaaaggggggattggggggtacagtgcaggggaaagaatagtagacataatagcaacagacatacaaactaaag

SEQ ID NO: 19484 - DNA, 301 bp, Artificial Sequence
  Trim72.3_NTC.8
  crRNA array
  misc_feature (148)..(157): n is a, c, g, or t
cttggctttatatatcttgtggaaaggacgaaacaccgtaatttctactaagtgtagatacgtgtgctggcacgacaagtaatttctactaagtgtagatcgaccgaggttacgctgggataatttctactaagtgtagatttttttnnnnnnnnnnaagcttggcgtggatccgatatcaactagatcttgagacaaatggcagtattcatccacaattttaaaagaaaaggggggattggggggtacagtgcaggggaaagaatagtagacataatagcaacagacatacaaactaaag

SEQ ID NO: 19485 - DNA, 301 bp, Artificial Sequence
  Trim72.3_NTC.9
  crRNA array
  misc_feature (148)..(157): n is a, c, g, or t
cttggctttatatatcttgtggaaaggacgaaacaccgtaatttctactaagtgtagatacgtgtgctggcacgacaagtaatttctactaagtgtagatatcgccgtacggctatggcataatttctactaagtgtagatttttttnnnnnnnnnnaagcttggcgtggatccgatatcaactagatcttgagacaaatggcagtattcatccacaattttaaaagaaaaggggggattggggggtacagtgcaggggaaagaatagtagacataatagcaacagacatacaaactaaag

SEQ ID NO: 19486 - DNA, 301 bp, Artificial Sequence
  Trim72.4_NTC.0
  crRNA array
  misc_feature (148)..(157): n is a, c, g, or t
cttggctttatatatcttgtggaaaggacgaaacaccgtaatttctactaagtgtagattgccgtgcctgcctgatccgtaatttctactaagtgtagattatagcgtcgcgcgctaatttaatttctactaagtgtagatttttttnnnnnnnnnnaagcttggcgtggatccgatatcaactagatcttgagacaaatggcagtattcatccacaattttaaaagaaaaggggggattggggggtacagtgcaggggaaagaatagtagacataatagcaacagacatacaaactaaag

SEQ ID NO: 19487 - DNA, 301 bp, Artificial Sequence
  Trim72.4_NTC.1
  crRNA array
  misc_feature (148)..(157): n is a, c, g, or t
cttggctttatatatcttgtggaaaggacgaaacaccgtaatttctactaagtgtagattgccgtgcctgcctgatccgtaatttctactaagtgtagatcgcgtaaccgttccggctcctaatttctactaagtgtagatttttttnnnnnnnnnnaagcttggcgtggatccgatatcaactagatcttgagacaaatggcagtattcatccacaattttaaaagaaaaggggggattggggggtacagtgcaggggaaagaatagtagacataatagcaacagacatacaaactaaag

SEQ ID NO: 19488 - DNA, 301 bp, Artificial Sequence
  Trim72.4_NTC.10
  crRNA array
  misc_feature (148)..(157): n is a, c, g, or t
cttggctttatatatcttgtggaaaggacgaaacaccgtaatttctactaagtgtagattgccgtgcctgcctgatccgtaatttctactaagtgtagatcgctaagttcgcgcgggccgtaatttctactaagtgtagatttttttnnnnnnnnnnaagcttggcgtggatccgatatcaactagatcttgagacaaatggcagtattcatccacaattttaaaagaaaaggggggattggggggtacagtgcaggggaaagaatagtagacataatagcaacagacatacaaactaaag

SEQ ID NO: 19489 - DNA, 301 bp, Artificial Sequence
  Trim72.4_NTC.11
  crRNA array
  misc_feature (148)..(157): n is a, c, g, or t
cttggctttatatatcttgtggaaaggacgaaacaccgtaatttctactaagtgtagattgccgtgcctgcctgatccgtaatttctactaagtgtagatcgttcgtcgacgaagcaatctaatttctactaagtgtagatttttttnnnnnnnnnnaagcttggcgtggatccgatatcaactagatcttgagacaaatggcagtattcatccacaattttaaaagaaaaggggggattggggggtacagtgcaggggaaagaatagtagacataatagcaacagacatacaaactaaag

SEQ ID NO: 19490 - DNA, 301 bp, Artificial Sequence
  Trim72.4_NTC.12
  crRNA array
  misc_feature (148)..(157): n is a, c, g, or t
cttggctttatatatcttgtggaaaggacgaaacaccgtaatttctactaagtgtagattgccgtgcctgcctgatccgtaatttctactaagtgtagatcgccgacgattaatcaatagtaatttctactaagtgtagatttttttnnnnnnnnnnaagcttggcgtggatccgatatcaactagatcttgagacaaatggcagtattcatccacaattttaaaagaaaaggggggattggggggtacagtgcaggggaaagaatagtagacataatagcaacagacatacaaactaaag

SEQ ID NO: 19491 - DNA, 301 bp, Artificial Sequence
  Trim72.4_NTC.13
  crRNA array
  misc_feature (148)..(157): n is a, c, g, or t
cttggctttatatatcttgtggaaaggacgaaacaccgtaatttctactaagtgtagattgccgtgcctgcctgatccgtaatttctactaagtgtagatgaccgttgtatcgcgatcaataatttctactaagtgtagatttttttnnnnnnnnnnaagcttggcgtggatccgatatcaactagatcttgagacaaatggcagtattcatccacaattttaaaagaaaaggggggattggggggtacagtgcaggggaaagaatagtagacataatagcaacagacatacaaactaaag

SEQ ID NO: 19492 - DNA, 301 bp, Artificial Sequence
  Trim72.4_NTC.14
  crRNA array
  misc_feature (148)..(157): n is a, c, g, or t
cttggctttatatatcttgtggaaaggacgaaacaccgtaatttctactaagtgtagattgccgtgcctgcctgatccgtaatttctactaagtgtagatccgttcgtgcgatagtgttttaatttctactaagtgtagatttttttnnnnnnnnnnaagcttggcgtggatccgatatcaactagatcttgagacaaatggcagtattcatccacaattttaaaagaaaaggggggattggggggtacagtgcaggggaaagaatagtagacataatagcaacagacatacaaactaaag

SEQ ID NO: 19493 - DNA, 301 bp, Artificial Sequence
  Trim72.4_NTC.15
  crRNA array
  misc_feature (148)..(157): n is a, c, g, or t
cttggctttatatatcttgtggaaaggacgaaacaccgtaatttctactaagtgtagattgccgtgcctgcctgatccgtaatttctactaagtgtagatgttgtcgtgccgcgaatttataatttctactaagtgtagatttttttnnnnnnnnnnaagcttggcgtggatccgatatcaactagatcttgagacaaatggcagtattcatccacaattttaaaagaaaaggggggattggggggtacagtgcaggggaaagaatagtagacataatagcaacagacatacaaactaaag

SEQ ID NO: 19494 - DNA, 301 bp, Artificial Sequence
  Trim72.4_NTC.16
  crRNA array
  misc_feature (148)..(157): n is a, c, g, or t
cttggctttatatatcttgtggaaaggacgaaacaccgtaatttctactaagtgtagattgccgtgcctgcctgatccgtaatttctactaagtgtagatcggtacgttagacgaaaatttaatttctactaagtgtagatttttttnnnnnnnnnnaagcttggcgtggatccgatatcaactagatcttgagacaaatggcagtattcatccacaattttaaaagaaaaggggggattggggggtacagtgcaggggaaagaatagtagacataatagcaacagacatacaaactaaag

SEQ ID NO: 19495 - DNA, 301 bp, Artificial Sequence
  Trim72.4_NTC.17
  crRNA array
  misc_feature (148)..(157): n is a, c, g, or t
cttggctttatatatcttgtggaaaggacgaaacaccgtaatttctactaagtgtagattgccgtgcctgcctgatccgtaatttctactaagtgtagattatcgaacgctatcgaacgttaatttctactaagtgtagatttttttnnnnnnnnnnaagcttggcgtggatccgatatcaactagatcttgagacaaatggcagtattcatccacaattttaaaagaaaaggggggattggggggtacagtgcaggggaaagaatagtagacataatagcaacagacatacaaactaaag

SEQ ID NO: 19496 - DNA, 301 bp, Artificial Sequence
  Trim72.4_NTC.18
  crRNA array
  misc_feature (148)..(157): n is a, c, g, or t
cttggctttatatatcttgtggaaaggacgaaacaccgtaatttctactaagtgtagattgccgtgcctgcctgatccgtaatttctactaagtgtagattccggttacgaccggcaaaataatttctactaagtgtagatttttttnnnnnnnnnnaagcttggcgtggatccgatatcaactagatcttgagacaaatggcagtattcatccacaattttaaaagaaaaggggggattggggggtacagtgcaggggaaagaatagtagacataatagcaacagacatacaaactaaag

SEQ ID NO: 19497 - DNA, 301 bp, Artificial Sequence
  Trim72.4_NTC.19
  crRNA array
  misc_feature (148)..(157): n is a, c, g, or t
cttggctttatatatcttgtggaaaggacgaaacaccgtaatttctactaagtgtagattgccgtgcctgcctgatccgtaatttctactaagtgtagatcgtcgtagaacgatacccgataatttctactaagtgtagatttttttnnnnnnnnnnaagcttggcgtggatccgatatcaactagatcttgagacaaatggcagtattcatccacaattttaaaagaaaaggggggattggggggtacagtgcaggggaaagaatagtagacataatagcaacagacatacaaactaaag

SEQ ID NO: 19498 - DNA, 301 bp, Artificial Sequence
  Trim72.4_NTC.2
  crRNA array
  misc_feature (148)..(157): n is a, c, g, or t
cttggctttatatatcttgtggaaaggacgaaacaccgtaatttctactaagtgtagattgccgtgcctgcctgatccgtaatttctactaagtgtagatttatgtcgcgccgcgacccgtaatttctactaagtgtagatttttttnnnnnnnnnnaagcttggcgtggatccgatatcaactagatcttgagacaaatggcagtattcatccacaattttaaaagaaaaggggggattggggggtacagtgcaggggaaagaatagtagacataatagcaacagacatacaaactaaag

SEQ ID NO: 19499 - DNA, 301 bp, Artificial Sequence
  Trim72.4_NTC.20
  crRNA array
  misc_feature (148)..(157): n is a, c, g, or t
cttggctttatatatcttgtggaaaggacgaaacaccgtaatttctactaagtgtagattgccgtgcctgcctgatccgtaatttctactaagtgtagatattccggcgcgaccagaagataatttctactaagtgtagatttttttnnnnnnnnnnaagcttggcgtggatccgatatcaactagatcttgagacaaatggcagtattcatccacaattttaaaagaaaaggggggattggggggtacagtgcaggggaaagaatagtagacataatagcaacagacatacaaactaaag

SEQ ID NO: 19500 - DNA, 301 bp, Artificial Sequence
  Trim72.4_NTC.21
  crRNA array
  misc_feature (148)..(157): n is a, c, g, or t
cttggctttatatatcttgtggaaaggacgaaacaccgtaatttctactaagtgtagattgccgtgcctgcctgatccgtaatttctactaagtgtagatgtataacttcgcgcggtccgtaatttctactaagtgtagatttttttnnnnnnnnnnaagcttggcgtggatccgatatcaactagatcttgagacaaatggcagtattcatccacaattttaaaagaaaaggggggattggggggtacagtgcaggggaaagaatagtagacataatagcaacagacatacaaactaaag

SEQ ID NO: 19501 - DNA, 301 bp, Artificial Sequence
  Trim72.4_NTC.22
  crRNA array
  misc_feature (148)..(157): n is a, c, g, or t
cttggctttatatatcttgtggaaaggacgaaacaccgtaatttctactaagtgtagattgccgtgcctgcctgatccgtaatttctactaagtgtagatgcgcgtcaacgtaatgtgcctaatttctactaagtgtagatttttttnnnnnnnnnnaagcttggcgtggatccgatatcaactagatcttgagacaaatggcagtattcatccacaattttaaaagaaaaggggggattggggggtacagtgcaggggaaagaatagtagacataatagcaacagacatacaaactaaag

SEQ ID NO: 19502 - DNA, 301 bp, Artificial Sequence
  Trim72.4_NTC.23
  crRNA array
  misc_feature (148)..(157): n is a, c, g, or t
cttggctttatatatcttgtggaaaggacgaaacaccgtaatttctactaagtgtagattgccgtgcctgcctgatccgtaatttctactaagtgtagatacgcgctattatcgtaggtgtaatttctactaagtgtagatttttttnnnnnnnnnnaagcttggcgtggatccgatatcaactagatcttgagacaaatggcagtattcatccacaattttaaaagaaaaggggggattggggggtacagtgcaggggaaagaatagtagacataatagcaacagacatacaaactaaag

SEQ ID NO: 19503 - DNA, 301 bp, Artificial Sequence
  Trim72.4_NTC.24
  crRNA array
  misc_feature (148)..(157): n is a, c, g, or t
cttggctttatatatcttgtggaaaggacgaaacaccgtaatttctactaagtgtagattgccgtgcctgcctgatccgtaatttctactaagtgtagatactatcgacgttcgtcccggtaatttctactaagtgtagatttttttnnnnnnnnnnaagcttggcgtggatccgatatcaactagatcttgagacaaatggcagtattcatccacaattttaaaagaaaaggggggattggggggtacagtgcaggggaaagaatagtagacataatagcaacagacatacaaactaaag

SEQ ID NO: 19504 - DNA, 301 bp, Artificial Sequence
  Trim72.4_NTC.25
  crRNA array
  misc_feature (148)..(157): n is a, c, g, or t
cttggctttatatatcttgtggaaaggacgaaacaccgtaatttctactaagtgtagattgccgtgcctgcctgatccgtaatttctactaagtgtagattcgcgttatcgtgccgtgcgtaatttctactaagtgtagatttttttnnnnnnnnnnaagcttggcgtggatccgatatcaactagatcttgagacaaatggcagtattcatccacaattttaaaagaaaaggggggattggggggtacagtgcaggggaaagaatagtagacataatagcaacagacatacaaactaaag

SEQ ID NO: 19505 - DNA, 301 bp, Artificial Sequence
  Trim72.4_NTC.26
  crRNA array
  misc_feature (148)..(157): n is a, c, g, or t
cttggctttatatatcttgtggaaaggacgaaacaccgtaatttctactaagtgtagattgccgtgcctgcctgatccgtaatttctactaagtgtagatcgcgacggcggttttaacactaatttctactaagtgtagatttttttnnnnnnnnnnaagcttggcgtggatccgatatcaactagatcttgagacaaatggcagtattcatccacaattttaaaagaaaaggggggattggggggtacagtgcaggggaaagaatagtagacataatagcaacagacatacaaactaaag

SEQ ID NO: 19506 - DNA, 301 bp, Artificial Sequence
  Trim72.4_NTC.27
  crRNA array
  misc_feature (148)..(157): n is a, c, g, or t
cttggctttatatatcttgtggaaaggacgaaacaccgtaatttctactaagtgtagattgccgtgcctgcctgatccgtaatttctactaagtgtagatgtcgcgttgcgaccggcgcttaatttctactaagtgtagatttttttnnnnnnnnnnaagcttggcgtggatccgatatcaactagatcttgagacaaatggcagtattcatccacaattttaaaagaaaaggggggattggggggtacagtgcaggggaaagaatagtagacataatagcaacagacatacaaactaaag

SEQ ID NO: 19507 - DNA, 301 bp, Artificial Sequence
  Trim72.4_NTC.28
  crRNA array
  misc_feature (148)..(157): n is a, c, g, or t
cttggctttatatatcttgtggaaaggacgaaacaccgtaatttctactaagtgtagattgccgtgcctgcctgatccgtaatttctactaagtgtagataccgctaatcggcgtaaacttaatttctactaagtgtagatttttttnnnnnnnnnnaagcttggcgtggatccgatatcaactagatcttgagacaaatggcagtattcatccacaattttaaaagaaaaggggggattggggggtacagtgcaggggaaagaatagtagacataatagcaacagacatacaaactaaag

SEQ ID NO: 19508 - DNA, 301 bp, Artificial Sequence
  Trim72.4_NTC.29
  crRNA array
  misc_feature (148)..(157): n is a, c, g, or t
cttggctttatatatcttgtggaaaggacgaaacaccgtaatttctactaagtgtagattgccgtgcctgcctgatccgtaatttctactaagtgtagatcgcgatctataccgtctatataatttctactaagtgtagatttttttnnnnnnnnnnaagcttggcgtggatccgatatcaactagatcttgagacaaatggcagtattcatccacaattttaaaagaaaaggggggattggggggtacagtgcaggggaaagaatagtagacataatagcaacagacatacaaactaaag

SEQ ID NO: 19509 - DNA, 301 bp, Artificial Sequence
  Trim72.4_NTC.3
  crRNA array
  misc_feature (148)..(157): n is a, c, g, or t
cttggctttatatatcttgtggaaaggacgaaacaccgtaatttctactaagtgtagattgccgtgcctgcctgatccgtaatttctactaagtgtagattcgacgcgagacgacgtacataatttctactaagtgtagatttttttnnnnnnnnnnaagcttggcgtggatccgatatcaactagatcttgagacaaatggcagtattcatccacaattttaaaagaaaaggggggattggggggtacagtgcaggggaaagaatagtagacataatagcaacagacatacaaactaaag

SEQ ID NO: 19510 - DNA, 301 bp, Artificial Sequence
  Trim72.4_NTC.30
  crRNA array
  misc_feature (148)..(157): n is a, c, g, or t
cttggctttatatatcttgtggaaaggacgaaacaccgtaatttctactaagtgtagattgccgtgcctgcctgatccgtaatttctactaagtgtagatcgatcgtacgggtgtcctaataatttctactaagtgtagatttttttnnnnnnnnnnaagcttggcgtggatccgatatcaactagatcttgagacaaatggcagtattcatccacaattttaaaagaaaaggggggattggggggtacagtgcaggggaaagaatagtagacataatagcaacagacatacaaactaaag

SEQ ID NO: 19511 - DNA, 301 bp, Artificial Sequence
  Trim72.4_NTC.31
  crRNA array
  misc_feature (148)..(157): n is a, c, g, or t
cttggctttatatatcttgtggaaaggacgaaacaccgtaatttctactaagtgtagattgccgtgcctgcctgatccgtaatttctactaagtgtagatgccgaccgcgtgattgtaggtaatttctactaagtgtagatttttttnnnnnnnnnnaagcttggcgtggatccgatatcaactagatcttgagacaaatggcagtattcatccacaattttaaaagaaaaggggggattggggggtacagtgcaggggaaagaatagtagacataatagcaacagacatacaaactaaag

SEQ ID NO: 19512 - DNA, 301 bp, Artificial Sequence
  Trim72.4_NTC.32
  crRNA array
  misc_feature (148)..(157): n is a, c, g, or t
cttggctttatatatcttgtggaaaggacgaaacaccgtaatttctactaagtgtagattgccgtgcctgcctgatccgtaatttctactaagtgtagatgcacgttacgcccgggtcactaatttctactaagtgtagatttttttnnnnnnnnnnaagcttggcgtggatccgatatcaactagatcttgagacaaatggcagtattcatccacaattttaaaagaaaaggggggattggggggtacagtgcaggggaaagaatagtagacataatagcaacagacatacaaactaaag

SEQ ID NO: 19513 - DNA, 301 bp, Artificial Sequence
  Trim72.4_NTC.33
  crRNA array
  misc_feature (148)..(157): n is a, c, g, or t
cttggctttatatatcttgtggaaaggacgaaacaccgtaatttctactaagtgtagattgccgtgcctgcctgatccgtaatttctactaagtgtagattaagcgaccgacgcattcgctaatttctactaagtgtagatttttttnnnnnnnnnnaagcttggcgtggatccgatatcaactagatcttgagacaaatggcagtattcatccacaattttaaaagaaaaggggggattggggggtacagtgcaggggaaagaatagtagacataatagcaacagacatacaaactaaag

SEQ ID NO: 19514 - DNA, 301 bp, Artificial Sequence
  Trim72.4_NTC.34
  crRNA array
  misc_feature (148)..(157): n is a, c, g, or t
cttggctttatatatcttgtggaaaggacgaaacaccgtaatttctactaagtgtagattgccgtgcctgcctgatccgtaatttctactaagtgtagattagcgttcgacacgtgaaactaatttctactaagtgtagatttttttnnnnnnnnnnaagcttggcgtggatccgatatcaactagatcttgagacaaatggcagtattcatccacaattttaaaagaaaaggggggattggggggtacagtgcaggggaaagaatagtagacataatagcaacagacatacaaactaaag

SEQ ID NO: 19515 - DNA, 301 bp, Artificial Sequence
  Trim72.4_NTC.35
  crRNA array
  misc_feature (148)..(157): n is a, c, g, or t
cttggctttatatatcttgtggaaaggacgaaacaccgtaatttctactaagtgtagattgccgtgcctgcctgatccgtaatttctactaagtgtagattggcgcgtaatcgctattcgtaatttctactaagtgtagatttttttnnnnnnnnnnaagcttggcgtggatccgatatcaactagatcttgagacaaatggcagtattcatccacaattttaaaagaaaaggggggattggggggtacagtgcaggggaaagaatagtagacataatagcaacagacatacaaactaaag

SEQ ID NO: 19516 - DNA, 301 bp, Artificial Sequence
  Trim72.4_NTC.36
  crRNA array
  misc_feature (148)..(157): n is a, c, g, or t
cttggctttatatatcttgtggaaaggacgaaacaccgtaatttctactaagtgtagattgccgtgcctgcctgatccgtaatttctactaagtgtagatcaacccgccgtagcgggccttaatttctactaagtgtagatttttttnnnnnnnnnnaagcttggcgtggatccgatatcaactagatcttgagacaaatggcagtattcatccacaattttaaaagaaaaggggggattggggggtacagtgcaggggaaagaatagtagacataatagcaacagacatacaaactaaag

SEQ ID NO: 19517 - DNA, 301 bp, Artificial Sequence
  Trim72.4_NTC.37
  crRNA array
  misc_feature (148)..(157): n is a, c, g, or t
cttggctttatatatcttgtggaaaggacgaaacaccgtaatttctactaagtgtagattgccgtgcctgcctgatccgtaatttctactaagtgtagattttgcgttgacgcgattacttaatttctactaagtgtagatttttttnnnnnnnnnnaagcttggcgtggatccgatatcaactagatcttgagacaaatggcagtattcatccacaattttaaaagaaaaggggggattggggggtacagtgcaggggaaagaatagtagacataatagcaacagacatacaaactaaag

SEQ ID NO: 19518 - DNA, 301 bp, Artificial Sequence
  Trim72.4_NTC.38
  crRNA array
  misc_feature (148)..(157): n is a, c, g, or t
cttggctttatatatcttgtggaaaggacgaaacaccgtaatttctactaagtgtagattgccgtgcctgcctgatccgtaatttctactaagtgtagataacggagcgcgatactaccataatttctactaagtgtagatttttttnnnnnnnnnnaagcttggcgtggatccgatatcaactagatcttgagacaaatggcagtattcatccacaattttaaaagaaaaggggggattggggggtacagtgcaggggaaagaatagtagacataatagcaacagacatacaaactaaag

SEQ ID NO: 19519 - DNA, 301 bp, Artificial Sequence
  Trim72.4_NTC.39
  crRNA array
  misc_feature (148)..(157): n is a, c, g, or t
cttggctttatatatcttgtggaaaggacgaaacaccgtaatttctactaagtgtagattgccgtgcctgcctgatccgtaatttctactaagtgtagatccggacgttataacgtttcttaatttctactaagtgtagatttttttnnnnnnnnnnaagcttggcgtggatccgatatcaactagatcttgagacaaatggcagtattcatccacaattttaaaagaaaaggggggattggggggtacagtgcaggggaaagaatagtagacataatagcaacagacatacaaactaaag

SEQ ID NO: 19520 - DNA, 301 bp, Artificial Sequence
  Trim72.4_NTC.4
  crRNA array
  misc_feature (148)..(157): n is a, c, g, or t
cttggctttatatatcttgtggaaaggacgaaacaccgtaatttctactaagtgtagattgccgtgcctgcctgatccgtaatttctactaagtgtagatatacccgtcgcgaacgtgagtaatttctactaagtgtagatttttttnnnnnnnnnnaagcttggcgtggatccgatatcaactagatcttgagacaaatggcagtattcatccacaattttaaaagaaaaggggggattggggggtacagtgcaggggaaagaatagtagacataatagcaacagacatacaaactaaag

SEQ ID NO: 19521 - DNA, 301 bp, Artificial Sequence
  Trim72.4_NTC.40
  crRNA array
  misc_feature (148)..(157): n is a, c, g, or t
cttggctttatatatcttgtggaaaggacgaaacaccgtaatttctactaagtgtagattgccgtgcctgcctgatccgtaatttctactaagtgtagatattcgcgaacccggccggaataatttctactaagtgtagatttttttnnnnnnnnnnaagcttggcgtggatccgatatcaactagatcttgagacaaatggcagtattcatccacaattttaaaagaaaaggggggattggggggtacagtgcaggggaaagaatagtagacataatagcaacagacatacaaactaaag

SEQ ID NO: 19522 - DNA, 301 bp, Artificial Sequence
  Trim72.4_NTC.41
  crRNA array
  misc_feature (148)..(157): n is a, c, g, or t
cttggctttatatatcttgtggaaaggacgaaacaccgtaatttctactaagtgtagattgccgtgcctgcctgatccgtaatttctactaagtgtagatttgatggcgcgacgcgttattaatttctactaagtgtagatttttttnnnnnnnnnnaagcttggcgtggatccgatatcaactagatcttgagacaaatggcagtattcatccacaattttaaaagaaaaggggggattggggggtacagtgcaggggaaagaatagtagacataatagcaacagacatacaaactaaag

SEQ ID NO: 19523 - DNA, 301 bp, Artificial Sequence
  Trim72.4_NTC.42
  crRNA array
  misc_feature (148)..(157): n is a, c, g, or t
cttggctttatatatcttgtggaaaggacgaaacaccgtaatttctactaagtgtagattgccgtgcctgcctgatccgtaatttctactaagtgtagatggtcaaatcgcggcgataactaatttctactaagtgtagatttttttnnnnnnnnnnaagcttggcgtggatccgatatcaactagatcttgagacaaatggcagtattcatccacaattttaaaagaaaaggggggattggggggtacagtgcaggggaaagaatagtagacataatagcaacagacatacaaactaaag

SEQ ID NO: 19524 - DNA, 301 bp, Artificial Sequence
  Trim72.4_NTC.43
  crRNA array
  misc_feature (148)..(157): n is a, c, g, or t
cttggctttatatatcttgtggaaaggacgaaacaccgtaatttctactaagtgtagattgccgtgcctgcctgatccgtaatttctactaagtgtagatcgactcgcgcattgaactggtaatttctactaagtgtagatttttttnnnnnnnnnnaagcttggcgtggatccgatatcaactagatcttgagacaaatggcagtattcatccacaattttaaaagaaaaggggggattggggggtacagtgcaggggaaagaatagtagacataatagcaacagacatacaaactaaag

SEQ ID NO: 19525 - DNA, 301 bp, Artificial Sequence
  Trim72.4_NTC.44
  crRNA array
  misc_feature (148)..(157): n is a, c, g, or t
cttggctttatatatcttgtggaaaggacgaaacaccgtaatttctactaagtgtagattgccgtgcctgcctgatccgtaatttctactaagtgtagatagcgtcgtacgatttatcgttaatttctactaagtgtagatttttttnnnnnnnnnnaagcttggcgtggatccgatatcaactagatcttgagacaaatggcagtattcatccacaattttaaaagaaaaggggggattggggggtacagtgcaggggaaagaatagtagacataatagcaacagacatacaaactaaag

SEQ ID NO: 19526 - DNA, 301 bp, Artificial Sequence
  Trim72.4_NTC.45
  crRNA array
  misc_feature (148)..(157): n is a, c, g, or t
cttggctttatatatcttgtggaaaggacgaaacaccgtaatttctactaagtgtagattgccgtgcctgcctgatccgtaatttctactaagtgtagatcggaacgcgtgatactagggtaatttctactaagtgtagatttttttnnnnnnnnnnaagcttggcgtggatccgatatcaactagatcttgagacaaatggcagtattcatccacaattttaaaagaaaaggggggattggggggtacagtgcaggggaaagaatagtagacataatagcaacagacatacaaactaaag

SEQ ID NO: 19527 - DNA, 301 bp, Artificial Sequence
  Trim72.4_NTC.46
  crRNA array
  misc_feature (148)..(157): n is a, c, g, or t
cttggctttatatatcttgtggaaaggacgaaacaccgtaatttctactaagtgtagattgccgtgcctgcctgatccgtaatttctactaagtgtagatagcgggtcgtagacgcgcggtaatttctactaagtgtagatttttttnnnnnnnnnnaagcttggcgtggatccgatatcaactagatcttgagacaaatggcagtattcatccacaattttaaaagaaaaggggggattggggggtacagtgcaggggaaagaatagtagacataatagcaacagacatacaaactaaag

SEQ ID NO: 19528 - DNA, 301 bp, Artificial Sequence
  Trim72.4_NTC.47
  crRNA array
  misc_feature (148)..(157): n is a, c, g, or t
cttggctttatatatcttgtggaaaggacgaaacaccgtaatttctactaagtgtagattgccgtgcctgcctgatccgtaatttctactaagtgtagattctcgtatcgcgattgttaataatttctactaagtgtagatttttttnnnnnnnnnnaagcttggcgtggatccgatatcaactagatcttgagacaaatggcagtattcatccacaattttaaaagaaaaggggggattggggggtacagtgcaggggaaagaatagtagacataatagcaacagacatacaaactaaag

SEQ ID NO: 19529 - DNA, 301 bp, Artificial Sequence
  Trim72.4_NTC.48
  crRNA array
  misc_feature (148)..(157): n is a, c, g, or t
cttggctttatatatcttgtggaaaggacgaaacaccgtaatttctactaagtgtagattgccgtgcctgcctgatccgtaatttctactaagtgtagatcggtcgactacggctgttagtaatttctactaagtgtagatttttttnnnnnnnnnnaagcttggcgtggatccgatatcaactagatcttgagacaaatggcagtattcatccacaattttaaaagaaaaggggggattggggggtacagtgcaggggaaagaatagtagacataatagcaacagacatacaaactaaag

SEQ ID NO: 19530 - DNA, 301 bp, Artificial Sequence
  Trim72.4_NTC.49
  crRNA array
  misc_feature (148)..(157): n is a, c, g, or t
cttggctttatatatcttgtggaaaggacgaaacaccgtaatttctactaagtgtagattgccgtgcctgcctgatccgtaatttctactaagtgtagattcggggcgcgtcaactgaattaatttctactaagtgtagatttttttnnnnnnnnnnaagcttggcgtggatccgatatcaactagatcttgagacaaatggcagtattcatccacaattttaaaagaaaaggggggattggggggtacagtgcaggggaaagaatagtagacataatagcaacagacatacaaactaaag

SEQ ID NO: 19531 - DNA, 301 bp, Artificial Sequence
  Trim72.4_NTC.5
  crRNA array
  misc_feature (148)..(157): n is a, c, g, or t
cttggctttatatatcttgtggaaaggacgaaacaccgtaatttctactaagtgtagattgccgtgcctgcctgatccgtaatttctactaagtgtagatgcttacgcgtcgcgaatgtataatttctactaagtgtagatttttttnnnnnnnnnnaagcttggcgtggatccgatatcaactagatcttgagacaaatggcagtattcatccacaattttaaaagaaaaggggggattggggggtacagtgcaggggaaagaatagtagacataatagcaacagacatacaaactaaag

SEQ ID NO: 19532 - DNA, 301 bp, Artificial Sequence
  Trim72.4_NTC.50
  crRNA array
  misc_feature (148)..(157): n is a, c, g, or t
cttggctttatatatcttgtggaaaggacgaaacaccgtaatttctactaagtgtagattgccgtgcctgcctgatccgtaatttctactaagtgtagatattgccgctcgcgcaaaatctaatttctactaagtgtagatttttttnnnnnnnnnnaagcttggcgtggatccgatatcaactagatcttgagacaaatggcagtattcatccacaattttaaaagaaaaggggggattggggggtacagtgcaggggaaagaatagtagacataatagcaacagacatacaaactaaag

SEQ ID NO: 19533 - DNA, 301 bp, Artificial Sequence
  Trim72.4_NTC.51
  crRNA array
  misc_feature (148)..(157): n is a, c, g, or t
cttggctttatatatcttgtggaaaggacgaaacaccgtaatttctactaagtgtagattgccgtgcctgcctgatccgtaatttctactaagtgtagattaacgcgcaacacgccaatgtaatttctactaagtgtagatttttttnnnnnnnnnnaagcttggcgtggatccgatatcaactagatcttgagacaaatggcagtattcatccacaattttaaaagaaaaggggggattggggggtacagtgcaggggaaagaatagtagacataatagcaacagacatacaaactaaag

SEQ ID NO: 19534 - DNA, 301 bp, Artificial Sequence
  Trim72.4_NTC.6
  crRNA array
  misc_feature (148)..(157): n is a, c, g, or t
cttggctttatatatcttgtggaaaggacgaaacaccgtaatttctactaagtgtagattgccgtgcctgcctgatccgtaatttctactaagtgtagatcgaatcgcgcctacgggaattaatttctactaagtgtagatttttttnnnnnnnnnnaagcttggcgtggatccgatatcaactagatcttgagacaaatggcagtattcatccacaattttaaaagaaaaggggggattggggggtacagtgcaggggaaagaatagtagacataatagcaacagacatacaaactaaag

SEQ ID NO: 19535 - DNA, 301 bp, Artificial Sequence
  Trim72.4_NTC.7
  crRNA array
  misc_feature (148)..(157): n is a, c, g, or t
cttggctttatatatcttgtggaaaggacgaaacaccgtaatttctactaagtgtagattgccgtgcctgcctgatccgtaatttctactaagtgtagatcgccgaacggataagactattaatttctactaagtgtagatttttttnnnnnnnnnnaagcttggcgtggatccgatatcaactagatcttgagacaaatggcagtattcatccacaattttaaaagaaaaggggggattggggggtacagtgcaggggaaagaatagtagacataatagcaacagacatacaaactaaag

SEQ ID NO: 19536 - DNA, 301 bp, Artificial Sequence
  Trim72.4_NTC.8
  crRNA array
  misc_feature (148)..(157): n is a, c, g, or t
cttggctttatatatcttgtggaaaggacgaaacaccgtaatttctactaagtgtagattgccgtgcctgcctgatccgtaatttctactaagtgtagatcgaccgaggttacgctgggataatttctactaagtgtagatttttttnnnnnnnnnnaagcttggcgtggatccgatatcaactagatcttgagacaaatggcagtattcatccacaattttaaaagaaaaggggggattggggggtacagtgcaggggaaagaatagtagacataatagcaacagacatacaaactaaag

SEQ ID NO: 19537 - DNA, 301 bp, Artificial Sequence
  Trim72.4_NTC.9
  crRNA array
  misc_feature (148)..(157): n is a, c, g, or t
cttggctttatatatcttgtggaaaggacgaaacaccgtaatttctactaagtgtagattgccgtgcctgcctgatccgtaatttctactaagtgtagatatcgccgtacggctatggcataatttctactaagtgtagatttttttnnnnnnnnnnaagcttggcgtggatccgatatcaactagatcttgagacaaatggcagtattcatccacaattttaaaagaaaaggggggattggggggtacagtgcaggggaaagaatagtagacataatagcaacagacatacaaactaaag

SEQ ID NO: 19538 - DNA, 301 bp, Artificial Sequence
  Trp53.1_NTC.0
  crRNA array
  misc_feature (148)..(157): n is a, c, g, or t
cttggctttatatatcttgtggaaaggacgaaacaccgtaatttctactaagtgtagatccctgaactgcccccagggataatttctactaagtgtagattatagcgtcgcgcgctaatttaatttctactaagtgtagatttttttnnnnnnnnnnaagcttggcgtggatccgatatcaactagatcttgagacaaatggcagtattcatccacaattttaaaagaaaaggggggattggggggtacagtgcaggggaaagaatagtagacataatagcaacagacatacaaactaaag

SEQ ID NO: 19539 - DNA, 301 bp, Artificial Sequence
  Trp53.1_NTC.1
  crRNA array
  misc_feature (148)..(157): n is a, c, g, or t
cttggctttatatatcttgtggaaaggacgaaacaccgtaatttctactaagtgtagatccctgaactgcccccagggataatttctactaagtgtagatcgcgtaaccgttccggctcctaatttctactaagtgtagatttttttnnnnnnnnnnaagcttggcgtggatccgatatcaactagatcttgagacaaatggcagtattcatccacaattttaaaagaaaaggggggattggggggtacagtgcaggggaaagaatagtagacataatagcaacagacatacaaactaaag

SEQ ID NO: 19540 - DNA, 301 bp, Artificial Sequence
  Trp53.1_NTC.10
  crRNA array
  misc_feature (148)..(157): n is a, c, g, or t
cttggctttatatatcttgtggaaaggacgaaacaccgtaatttctactaagtgtagatccctgaactgcccccagggataatttctactaagtgtagatcgctaagttcgcgcgggccgtaatttctactaagtgtagatttttttnnnnnnnnnnaagcttggcgtggatccgatatcaactagatcttgagacaaatggcagtattcatccacaattttaaaagaaaaggggggattggggggtacagtgcaggggaaagaatagtagacataatagcaacagacatacaaactaaag

SEQ ID NO: 19541 - DNA, 301 bp, Artificial Sequence
  Trp53.1_NTC.11
  crRNA array
  misc_feature (148)..(157): n is a, c, g, or t
cttggctttatatatcttgtggaaaggacgaaacaccgtaatttctactaagtgtagatccctgaactgcccccagggataatttctactaagtgtagatcgttcgtcgacgaagcaatctaatttctactaagtgtagatttttttnnnnnnnnnnaagcttggcgtggatccgatatcaactagatcttgagacaaatggcagtattcatccacaattttaaaagaaaaggggggattggggggtacagtgcaggggaaagaatagtagacataatagcaacagacatacaaactaaag

SEQ ID NO: 19542 - DNA, 301 bp, Artificial Sequence
  Trp53.1_NTC.12
  crRNA array
  misc_feature (148)..(157): n is a, c, g, or t
cttggctttatatatcttgtggaaaggacgaaacaccgtaatttctactaagtgtagatccctgaactgcccccagggataatttctactaagtgtagatcgccgacgattaatcaatagtaatttctactaagtgtagatttttttnnnnnnnnnnaagcttggcgtggatccgatatcaactagatcttgagacaaatggcagtattcatccacaattttaaaagaaaaggggggattggggggtacagtgcaggggaaagaatagtagacataatagcaacagacatacaaactaaag

SEQ ID NO: 19543 - DNA, 301 bp, Artificial Sequence
  Trp53.1_NTC.13
  crRNA array
  misc_feature (148)..(157): n is a, c, g, or t
cttggctttatatatcttgtggaaaggacgaaacaccgtaatttctactaagtgtagatccctgaactgcccccagggataatttctactaagtgtagatgaccgttgtatcgcgatcaataatttctactaagtgtagatttttttnnnnnnnnnnaagcttggcgtggatccgatatcaactagatcttgagacaaatggcagtattcatccacaattttaaaagaaaaggggggattggggggtacagtgcaggggaaagaatagtagacataatagcaacagacatacaaactaaag

SEQ ID NO: 19544 - DNA, 301 bp, Artificial Sequence
  Trp53.1_NTC.14
  crRNA array
  misc_feature (148)..(157): n is a, c, g, or t
cttggctttatatatcttgtggaaaggacgaaacaccgtaatttctactaagtgtagatccctgaactgcccccagggataatttctactaagtgtagatccgttcgtgcgatagtgttttaatttctactaagtgtagatttttttnnnnnnnnnnaagcttggcgtggatccgatatcaactagatcttgagacaaatggcagtattcatccacaattttaaaagaaaaggggggattggggggtacagtgcaggggaaagaatagtagacataatagcaacagacatacaaactaaag

SEQ ID NO: 19545 - DNA, 301 bp, Artificial Sequence
  Trp53.1_NTC.15
  crRNA array
  misc_feature (148)..(157): n is a, c, g, or t
cttggctttatatatcttgtggaaaggacgaaacaccgtaatttctactaagtgtagatccctgaactgcccccagggataatttctactaagtgtagatgttgtcgtgccgcgaatttataatttctactaagtgtagatttttttnnnnnnnnnnaagcttggcgtggatccgatatcaactagatcttgagacaaatggcagtattcatccacaattttaaaagaaaaggggggattggggggtacagtgcaggggaaagaatagtagacataatagcaacagacatacaaactaaag

SEQ ID NO: 19546 - DNA, 301 bp, Artificial Sequence
  Trp53.1_NTC.16
  crRNA array
  misc_feature (148)..(157): n is a, c, g, or t
cttggctttatatatcttgtggaaaggacgaaacaccgtaatttctactaagtgtagatccctgaactgcccccagggataatttctactaagtgtagatcggtacgttagacgaaaatttaatttctactaagtgtagatttttttnnnnnnnnnnaagcttggcgtggatccgatatcaactagatcttgagacaaatggcagtattcatccacaattttaaaagaaaaggggggattggggggtacagtgcaggggaaagaatagtagacataatagcaacagacatacaaactaaag

SEQ ID NO: 19547 - DNA, 301 bp, Artificial Sequence
  Trp53.1_NTC.17
  crRNA array
  misc_feature (148)..(157): n is a, c, g, or t
cttggctttatatatcttgtggaaaggacgaaacaccgtaatttctactaagtgtagatccctgaactgcccccagggataatttctactaagtgtagattatcgaacgctatcgaacgttaatttctactaagtgtagatttttttnnnnnnnnnnaagcttggcgtggatccgatatcaactagatcttgagacaaatggcagtattcatccacaattttaaaagaaaaggggggattggggggtacagtgcaggggaaagaatagtagacataatagcaacagacatacaaactaaag

SEQ ID NO: 19548 - DNA, 301 bp, Artificial Sequence
  Trp53.1_NTC.18
  crRNA array
  misc_feature (148)..(157): n is a, c, g, or t
cttggctttatatatcttgtggaaaggacgaaacaccgtaatttctactaagtgtagatccctgaactgcccccagggataatttctactaagtgtagattccggttacgaccggcaaaataatttctactaagtgtagatttttttnnnnnnnnnnaagcttggcgtggatccgatatcaactagatcttgagacaaatggcagtattcatccacaattttaaaagaaaaggggggattggggggtacagtgcaggggaaagaatagtagacataatagcaacagacatacaaactaaag

SEQ ID NO: 19549 - DNA, 301 bp, Artificial Sequence
  Trp53.1_NTC.19
  crRNA array
  misc_feature (148)..(157): n is a, c, g, or t
cttggctttatatatcttgtggaaaggacgaaacaccgtaatttctactaagtgtagatccctgaactgcccccagggataatttctactaagtgtagatcgtcgtagaacgatacccgataatttctactaagtgtagatttttttnnnnnnnnnnaagcttggcgtggatccgatatcaactagatcttgagacaaatggcagtattcatccacaattttaaaagaaaaggggggattggggggtacagtgcaggggaaagaatagtagacataatagcaacagacatacaaactaaag

SEQ ID NO: 19550 - DNA, 301 bp, Artificial Sequence
  Trp53.1_NTC.2
  crRNA array
  misc_feature (148)..(157): n is a, c, g, or t
cttggctttatatatcttgtggaaaggacgaaacaccgtaatttctactaagtgtagatccctgaactgcccccagggataatttctactaagtgtagatttatgtcgcgccgcgacccgtaatttctactaagtgtagatttttttnnnnnnnnnnaagcttggcgtggatccgatatcaactagatcttgagacaaatggcagtattcatccacaattttaaaagaaaaggggggattggggggtacagtgcaggggaaagaatagtagacataatagcaacagacatacaaactaaag

SEQ ID NO: 19551 - DNA, 301 bp, Artificial Sequence
  Trp53.1_NTC.20
  crRNA array
  misc_feature (148)..(157): n is a, c, g, or t
cttggctttatatatcttgtggaaaggacgaaacaccgtaatttctactaagtgtagatccctgaactgcccccagggataatttctactaagtgtagatattccggcgcgaccagaagataatttctactaagtgtagatttttttnnnnnnnnnnaagcttggcgtggatccgatatcaactagatcttgagacaaatggcagtattcatccacaattttaaaagaaaaggggggattggggggtacagtgcaggggaaagaatagtagacataatagcaacagacatacaaactaaag

SEQ ID NO: 19552 - DNA, 301 bp, Artificial Sequence
  Trp53.1_NTC.21
  crRNA array
  misc_feature (148)..(157): n is a, c, g, or t
cttggctttatatatcttgtggaaaggacgaaacaccgtaatttctactaagtgtagatccctgaactgcccccagggataatttctactaagtgtagatgtataacttcgcgcggtccgtaatttctactaagtgtagatttttttnnnnnnnnnnaagcttggcgtggatccgatatcaactagatcttgagacaaatggcagtattcatccacaattttaaaagaaaaggggggattggggggtacagtgcaggggaaagaatagtagacataatagcaacagacatacaaactaaag

SEQ ID NO: 19553 - DNA, 301 bp, Artificial Sequence
  Trp53.1_NTC.22
  crRNA array
  misc_feature (148)..(157): n is a, c, g, or t
cttggctttatatatcttgtggaaaggacgaaacaccgtaatttctactaagtgtagatccctgaactgcccccagggataatttctactaagtgtagatgcgcgtcaacgtaatgtgcctaatttctactaagtgtagatttttttnnnnnnnnnnaagcttggcgtggatccgatatcaactagatcttgagacaaatggcagtattcatccacaattttaaaagaaaaggggggattggggggtacagtgcaggggaaagaatagtagacataatagcaacagacatacaaactaaag

SEQ ID NO: 19554 - DNA, 301 bp, Artificial Sequence
  Trp53.1_NTC.23
  crRNA array
  misc_feature (148)..(157): n is a, c, g, or t
cttggctttatatatcttgtggaaaggacgaaacaccgtaatttctactaagtgtagatccctgaactgcccccagggataatttctactaagtgtagatacgcgctattatcgtaggtgtaatttctactaagtgtagatttttttnnnnnnnnnnaagcttggcgtggatccgatatcaactagatcttgagacaaatggcagtattcatccacaattttaaaagaaaaggggggattggggggtacagtgcaggggaaagaatagtagacataatagcaacagacatacaaactaaag

SEQ ID NO: 19555 - DNA, 301 bp, Artificial Sequence
  Trp53.1_NTC.24
  crRNA array
  misc_feature (148)..(157): n is a, c, g, or t
cttggctttatatatcttgtggaaaggacgaaacaccgtaatttctactaagtgtagatccctgaactgcccccagggataatttctactaagtgtagatactatcgacgttcgtcccggtaatttctactaagtgtagatttttttnnnnnnnnnnaagcttggcgtggatccgatatcaactagatcttgagacaaatggcagtattcatccacaattttaaaagaaaaggggggattggggggtacagtgcaggggaaagaatagtagacataatagcaacagacatacaaactaaag

SEQ ID NO: 19556 - DNA, 301 bp, Artificial Sequence
  Trp53.1_NTC.25
  crRNA array
  misc_feature (148)..(157): n is a, c, g, or t
cttggctttatatatcttgtggaaaggacgaaacaccgtaatttctactaagtgtagatccctgaactgcccccagggataatttctactaagtgtagattcgcgttatcgtgccgtgcgtaatttctactaagtgtagatttttttnnnnnnnnnnaagcttggcgtggatccgatatcaactagatcttgagacaaatggcagtattcatccacaattttaaaagaaaaggggggattggggggtacagtgcaggggaaagaatagtagacataatagcaacagacatacaaactaaag

SEQ ID NO: 19557 - DNA, 301 bp, Artificial Sequence
  Trp53.1_NTC.26
  crRNA array
  misc_feature (148)..(157): n is a, c, g, or t
cttggctttatatatcttgtggaaaggacgaaacaccgtaatttctactaagtgtagatccctgaactgcccccagggataatttctactaagtgtagatcgcgacggcggttttaacactaatttctactaagtgtagatttttttnnnnnnnnnnaagcttggcgtggatccgatatcaactagatcttgagacaaatggcagtattcatccacaattttaaaagaaaaggggggattggggggtacagtgcaggggaaagaatagtagacataatagcaacagacatacaaactaaag

SEQ ID NO: 19558 - DNA, 301 bp, Artificial Sequence
  Trp53.1_NTC.27
  crRNA array
  misc_feature (148)..(157): n is a, c, g, or t
cttggctttatatatcttgtggaaaggacgaaacaccgtaatttctactaagtgtagatccctgaactgcccccagggataatttctactaagtgtagatgtcgcgttgcgaccggcgcttaatttctactaagtgtagatttttttnnnnnnnnnnaagcttggcgtggatccgatatcaactagatcttgagacaaatggcagtattcatccacaattttaaaagaaaaggggggattggggggtacagtgcaggggaaagaatagtagacataatagcaacagacatacaaactaaag

SEQ ID NO: 19559 - DNA, 301 bp, Artificial Sequence
  Trp53.1_NTC.28
  crRNA array
  misc_feature (148)..(157): n is a, c, g, or t
cttggctttatatatcttgtggaaaggacgaaacaccgtaatttctactaagtgtagatccctgaactgcccccagggataatttctactaagtgtagataccgctaatcggcgtaaacttaatttctactaagtgtagatttttttnnnnnnnnnnaagcttggcgtggatccgatatcaactagatcttgagacaaatggcagtattcatccacaattttaaaagaaaaggggggattggggggtacagtgcaggggaaagaatagtagacataatagcaacagacatacaaactaaag

SEQ ID NO: 19560 - DNA, 301 bp, Artificial Sequence
  Trp53.1_NTC.29
  crRNA array
  misc_feature (148)..(157): n is a, c, g, or t
cttggctttatatatcttgtggaaaggacgaaacaccgtaatttctactaagtgtagatccctgaactgcccccagggataatttctactaagtgtagatcgcgatctataccgtctatataatttctactaagtgtagatttttttnnnnnnnnnnaagcttggcgtggatccgatatcaactagatcttgagacaaatggcagtattcatccacaattttaaaagaaaaggggggattggggggtacagtgcaggggaaagaatagtagacataatagcaacagacatacaaactaaag

SEQ ID NO: 19561 - DNA, 301 bp, Artificial Sequence
  Trp53.1_NTC.3
  crRNA array
  misc_feature (148)..(157): n is a, c, g, or t
cttggctttatatatcttgtggaaaggacgaaacaccgtaatttctactaagtgtagatccctgaactgcccccagggataatttctactaagtgtagattcgacgcgagacgacgtacataatttctactaagtgtagatttttttnnnnnnnnnnaagcttggcgtggatccgatatcaactagatcttgagacaaatggcagtattcatccacaattttaaaagaaaaggggggattggggggtacagtgcaggggaaagaatagtagacataatagcaacagacatacaaactaaag

SEQ ID NO: 19562 - DNA, 301 bp, Artificial Sequence
  Trp53.1_NTC.30
  crRNA array
  misc_feature (148)..(157): n is a, c, g, or t
cttggctttatatatcttgtggaaaggacgaaacaccgtaatttctactaagtgtagatccctgaactgcccccagggataatttctactaagtgtagatcgatcgtacgggtgtcctaataatttctactaagtgtagatttttttnnnnnnnnnnaagcttggcgtggatccgatatcaactagatcttgagacaaatggcagtattcatccacaattttaaaagaaaaggggggattggggggtacagtgcaggggaaagaatagtagacataatagcaacagacatacaaactaaag

SEQ ID NO: 19563 - DNA, 301 bp, Artificial Sequence
  Trp53.1_NTC.31
  crRNA array
  misc_feature (148)..(157): n is a, c, g, or t
cttggctttatatatcttgtggaaaggacgaaacaccgtaatttctactaagtgtagatccctgaactgcccccagggataatttctactaagtgtagatgccgaccgcgtgattgtaggtaatttctactaagtgtagatttttttnnnnnnnnnnaagcttggcgtggatccgatatcaactagatcttgagacaaatggcagtattcatccacaattttaaaagaaaaggggggattggggggtacagtgcaggggaaagaatagtagacataatagcaacagacatacaaactaaag

SEQ ID NO: 19564 - DNA, 301 bp, Artificial Sequence
  Trp53.1_NTC.32
  crRNA array
  misc_feature (148)..(157): n is a, c, g, or t
cttggctttatatatcttgtggaaaggacgaaacaccgtaatttctactaagtgtagatccctgaactgcccccagggataatttctactaagtgtagatgcacgttacgcccgggtcactaatttctactaagtgtagatttttttnnnnnnnnnnaagcttggcgtggatccgatatcaactagatcttgagacaaatggcagtattcatccacaattttaaaagaaaaggggggattggggggtacagtgcaggggaaagaatagtagacataatagcaacagacatacaaactaaag

SEQ ID NO: 19565 - DNA, 301 bp, Artificial Sequence
  Trp53.1_NTC.33
  crRNA array
  misc_feature (148)..(157): n is a, c, g, or t
cttggctttatatatcttgtggaaaggacgaaacaccgtaatttctactaagtgtagatccctgaactgcccccagggataatttctactaagtgtagattaagcgaccgacgcattcgctaatttctactaagtgtagatttttttnnnnnnnnnnaagcttggcgtggatccgatatcaactagatcttgagacaaatggcagtattcatccacaattttaaaagaaaaggggggattggggggtacagtgcaggggaaagaatagtagacataatagcaacagacatacaaactaaag

SEQ ID NO: 19566 - DNA, 301 bp, Artificial Sequence
  Trp53.1_NTC.34
  crRNA array
  misc_feature (148)..(157): n is a, c, g, or t
cttggctttatatatcttgtggaaaggacgaaacaccgtaatttctactaagtgtagatccctgaactgcccccagggataatttctactaagtgtagattagcgttcgacacgtgaaactaatttctactaagtgtagatttttttnnnnnnnnnnaagcttggcgtggatccgatatcaactagatcttgagacaaatggcagtattcatccacaattttaaaagaaaaggggggattggggggtacagtgcaggggaaagaatagtagacataatagcaacagacatacaaactaaag

SEQ ID NO: 19567 - DNA, 301 bp, Artificial Sequence
  Trp53.1_NTC.35
  crRNA array
  misc_feature (148)..(157): n is a, c, g, or t
cttggctttatatatcttgtggaaaggacgaaacaccgtaatttctactaagtgtagatccctgaactgcccccagggataatttctactaagtgtagattggcgcgtaatcgctattcgtaatttctactaagtgtagatttttttnnnnnnnnnnaagcttggcgtggatccgatatcaactagatcttgagacaaatggcagtattcatccacaattttaaaagaaaaggggggattggggggtacagtgcaggggaaagaatagtagacataatagcaacagacatacaaactaaag

SEQ ID NO: 19568 - DNA, 301 bp, Artificial Sequence
  Trp53.1_NTC.36
  crRNA array
  misc_feature (148)..(157): n is a, c, g, or t
cttggctttatatatcttgtggaaaggacgaaacaccgtaatttctactaagtgtagatccctgaactgcccccagggataatttctactaagtgtagatcaacccgccgtagcgggccttaatttctactaagtgtagatttttttnnnnnnnnnnaagcttggcgtggatccgatatcaactagatcttgagacaaatggcagtattcatccacaattttaaaagaaaaggggggattggggggtacagtgcaggggaaagaatagtagacataatagcaacagacatacaaactaaag

SEQ ID NO: 19569 - DNA, 301 bp, Artificial Sequence
  Trp53.1_NTC.37
  crRNA array
  misc_feature (148)..(157): n is a, c, g, or t
cttggctttatatatcttgtggaaaggacgaaacaccgtaatttctactaagtgtagatccctgaactgcccccagggataatttctactaagtgtagattttgcgttgacgcgattacttaatttctactaagtgtagatttttttnnnnnnnnnnaagcttggcgtggatccgatatcaactagatcttgagacaaatggcagtattcatccacaattttaaaagaaaaggggggattggggggtacagtgcaggggaaagaatagtagacataatagcaacagacatacaaactaaag

SEQ ID NO: 19570 - DNA, 301 bp, Artificial Sequence
  Trp53.1_NTC.38
  crRNA array
  misc_feature (148)..(157): n is a, c, g, or t
cttggctttatatatcttgtggaaaggacgaaacaccgtaatttctactaagtgtagatccctgaactgcccccagggataatttctactaagtgtagataacggagcgcgatactaccataatttctactaagtgtagatttttttnnnnnnnnnnaagcttggcgtggatccgatatcaactagatcttgagacaaatggcagtattcatccacaattttaaaagaaaaggggggattggggggtacagtgcaggggaaagaatagtagacataatagcaacagacatacaaactaaag

SEQ ID NO: 19571 - DNA, 301 bp, Artificial Sequence
  Trp53.1_NTC.39
  crRNA array
  misc_feature (148)..(157): n is a, c, g, or t
cttggctttatatatcttgtggaaaggacgaaacaccgtaatttctactaagtgtagatccctgaactgcccccagggataatttctactaagtgtagatccggacgttataacgtttcttaatttctactaagtgtagatttttttnnnnnnnnnnaagcttggcgtggatccgatatcaactagatcttgagacaaatggcagtattcatccacaattttaaaagaaaaggggggattggggggtacagtgcaggggaaagaatagtagacataatagcaacagacatacaaactaaag

SEQ ID NO: 19572 - DNA, 301 bp, Artificial Sequence
  Trp53.1_NTC.4
  crRNA array
  misc_feature (148)..(157): n is a, c, g, or t
cttggctttatatatcttgtggaaaggacgaaacaccgtaatttctactaagtgtagatccctgaactgcccccagggataatttctactaagtgtagatatacccgtcgcgaacgtgagtaatttctactaagtgtagatttttttnnnnnnnnnnaagcttggcgtggatccgatatcaactagatcttgagacaaatggcagtattcatccacaattttaaaagaaaaggggggattggggggtacagtgcaggggaaagaatagtagacataatagcaacagacatacaaactaaag

SEQ ID NO: 19573 - DNA, 301 bp, Artificial Sequence
  Trp53.1_NTC.40
  crRNA array
  misc_feature (148)..(157): n is a, c, g, or t
cttggctttatatatcttgtggaaaggacgaaacaccgtaatttctactaagtgtagatccctgaactgcccccagggataatttctactaagtgtagatattcgcgaacccggccggaataatttctactaagtgtagatttttttnnnnnnnnnnaagcttggcgtggatccgatatcaactagatcttgagacaaatggcagtattcatccacaattttaaaagaaaaggggggattggggggtacagtgcaggggaaagaatagtagacataatagcaacagacatacaaactaaag

SEQ ID NO: 19574 - DNA, 301 bp, Artificial Sequence
  Trp53.1_NTC.41
  crRNA array
  misc_feature (148)..(157): n is a, c, g, or t
cttggctttatatatcttgtggaaaggacgaaacaccgtaatttctactaagtgtagatccctgaactgcccccagggataatttctactaagtgtagatttgatggcgcgacgcgttattaatttctactaagtgtagatttttttnnnnnnnnnnaagcttggcgtggatccgatatcaactagatcttgagacaaatggcagtattcatccacaattttaaaagaaaaggggggattggggggtacagtgcaggggaaagaatagtagacataatagcaacagacatacaaactaaag

SEQ ID NO: 19575 - DNA, 301 bp, Artificial Sequence
  Trp53.1_NTC.42
  crRNA array
  misc_feature (148)..(157): n is a, c, g, or t
cttggctttatatatcttgtggaaaggacgaaacaccgtaatttctactaagtgtagatccctgaactgcccccagggataatttctactaagtgtagatggtcaaatcgcggcgataactaatttctactaagtgtagatttttttnnnnnnnnnnaagcttggcgtggatccgatatcaactagatcttgagacaaatggcagtattcatccacaattttaaaagaaaaggggggattggggggtacagtgcaggggaaagaatagtagacataatagcaacagacatacaaactaaag

SEQ ID NO: 19576 - DNA, 301 bp, Artificial Sequence
  Trp53.1_NTC.43
  crRNA array
  misc_feature (148)..(157): n is a, c, g, or t
cttggctttatatatcttgtggaaaggacgaaacaccgtaatttctactaagtgtagatccctgaactgcccccagggataatttctactaagtgtagatcgactcgcgcattgaactggtaatttctactaagtgtagatttttttnnnnnnnnnnaagcttggcgtggatccgatatcaactagatcttgagacaaatggcagtattcatccacaattttaaaagaaaaggggggattggggggtacagtgcaggggaaagaatagtagacataatagcaacagacatacaaactaaag

SEQ ID NO: 19577 - DNA, 301 bp, Artificial Sequence
  Trp53.1_NTC.44
  crRNA array
  misc_feature (148)..(157): n is a, c, g, or t
cttggctttatatatcttgtggaaaggacgaaacaccgtaatttctactaagtgtagatccctgaactgcccccagggataatttctactaagtgtagatagcgtcgtacgatttatcgttaatttctactaagtgtagatttttttnnnnnnnnnnaagcttggcgtggatccgatatcaactagatcttgagacaaatggcagtattcatccacaattttaaaagaaaaggggggattggggggtacagtgcaggggaaagaatagtagacataatagcaacagacatacaaactaaag

SEQ ID NO: 19578 - DNA, 301 bp, Artificial Sequence
  Trp53.1_NTC.45
  crRNA array
  misc_feature (148)..(157): n is a, c, g, or t
cttggctttatatatcttgtggaaaggacgaaacaccgtaatttctactaagtgtagatccctgaactgcccccagggataatttctactaagtgtagatcggaacgcgtgatactagggtaatttctactaagtgtagatttttttnnnnnnnnnnaagcttggcgtggatccgatatcaactagatcttgagacaaatggcagtattcatccacaattttaaaagaaaaggggggattggggggtacagtgcaggggaaagaatagtagacataatagcaacagacatacaaactaaag

SEQ ID NO: 19579 - DNA, 301 bp, Artificial Sequence
  Trp53.1_NTC.46
  crRNA array
  misc_feature (148)..(157): n is a, c, g, or t
cttggctttatatatcttgtggaaaggacgaaacaccgtaatttctactaagtgtagatccctgaactgcccccagggataatttctactaagtgtagatagcgggtcgtagacgcgcggtaatttctactaagtgtagatttttttnnnnnnnnnnaagcttggcgtggatccgatatcaactagatcttgagacaaatggcagtattcatccacaattttaaaagaaaaggggggattggggggtacagtgcaggggaaagaatagtagacataatagcaacagacatacaaactaaag

SEQ ID NO: 19580 - DNA, 301 bp, Artificial Sequence
  Trp53.1_NTC.47
  crRNA array
  misc_feature (148)..(157): n is a, c, g, or t
cttggctttatatatcttgtggaaaggacgaaacaccgtaatttctactaagtgtagatccctgaactgcccccagggataatttctactaagtgtagattctcgtatcgcgattgttaataatttctactaagtgtagatttttttnnnnnnnnnnaagcttggcgtggatccgatatcaactagatcttgagacaaatggcagtattcatccacaattttaaaagaaaaggggggattggggggtacagtgcaggggaaagaatagtagacataatagcaacagacatacaaactaaag

SEQ ID NO: 19581 - DNA, 301 bp, Artificial Sequence
  Trp53.1_NTC.48
  crRNA array
  misc_feature (148)..(157): n is a, c, g, or t
cttggctttatatatcttgtggaaaggacgaaacaccgtaatttctactaagtgtagatccctgaactgcccccagggataatttctactaagtgtagatcggtcgactacggctgttagtaatttctactaagtgtagatttttttnnnnnnnnnnaagcttggcgtggatccgatatcaactagatcttgagacaaatggcagtattcatccacaattttaaaagaaaaggggggattggggggtacagtgcaggggaaagaatagtagacataatagcaacagacatacaaactaaag

SEQ ID NO: 19582 - DNA, 301 bp, Artificial Sequence
  Trp53.1_NTC.49
  crRNA array
  misc_feature (148)..(157): n is a, c, g, or t
cttggctttatatatcttgtggaaaggacgaaacaccgtaatttctactaagtgtagatccctgaactgcccccagggataatttctactaagtgtagattcggggcgcgtcaactgaattaatttctactaagtgtagatttttttnnnnnnnnnnaagcttggcgtggatccgatatcaactagatcttgagacaaatggcagtattcatccacaattttaaaagaaaaggggggattggggggtacagtgcaggggaaagaatagtagacataatagcaacagacatacaaactaaag

SEQ ID NO: 19583 - DNA, 301 bp, Artificial Sequence
  Trp53.1_NTC.5
  crRNA array
  misc_feature (148)..(157): n is a, c, g, or t
cttggctttatatatcttgtggaaaggacgaaacaccgtaatttctactaagtgtagatccctgaactgcccccagggataatttctactaagtgtagatgcttacgcgtcgcgaatgtataatttctactaagtgtagatttttttnnnnnnnnnnaagcttggcgtggatccgatatcaactagatcttgagacaaatggcagtattcatccacaattttaaaagaaaaggggggattggggggtacagtgcaggggaaagaatagtagacataatagcaacagacatacaaactaaag

SEQ ID NO: 19584 - DNA, 301 bp, Artificial Sequence
  Trp53.1_NTC.50
  crRNA array
  misc_feature (148)..(157): n is a, c, g, or t
cttggctttatatatcttgtggaaaggacgaaacaccgtaatttctactaagtgtagatccctgaactgcccccagggataatttctactaagtgtagatattgccgctcgcgcaaaatctaatttctactaagtgtagatttttttnnnnnnnnnnaagcttggcgtggatccgatatcaactagatcttgagacaaatggcagtattcatccacaattttaaaagaaaaggggggattggggggtacagtgcaggggaaagaatagtagacataatagcaacagacatacaaactaaag

SEQ ID NO: 19585 - DNA, 301 bp, Artificial Sequence
  Trp53.1_NTC.51
  crRNA array
  misc_feature (148)..(157): n is a, c, g, or t
cttggctttatatatcttgtggaaaggacgaaacaccgtaatttctactaagtgtagatccctgaactgcccccagggataatttctactaagtgtagattaacgcgcaacacgccaatgtaatttctactaagtgtagatttttttnnnnnnnnnnaagcttggcgtggatccgatatcaactagatcttgagacaaatggcagtattcatccacaattttaaaagaaaaggggggattggggggtacagtgcaggggaaagaatagtagacataatagcaacagacatacaaactaaag

SEQ ID NO: 19586 - DNA, 301 bp, Artificial Sequence
  Trp53.1_NTC.6
  crRNA array
  misc_feature (148)..(157): n is a, c, g, or t
cttggctttatatatcttgtggaaaggacgaaacaccgtaatttctactaagtgtagatccctgaactgcccccagggataatttctactaagtgtagatcgaatcgcgcctacgggaattaatttctactaagtgtagatttttttnnnnnnnnnnaagcttggcgtggatccgatatcaactagatcttgagacaaatggcagtattcatccacaattttaaaagaaaaggggggattggggggtacagtgcaggggaaagaatagtagacataatagcaacagacatacaaactaaag

SEQ ID NO: 19587 - DNA, 301 bp, Artificial Sequence
  Trp53.1_NTC.7
  crRNA array
  misc_feature (148)..(157): n is a, c, g, or t
cttggctttatatatcttgtggaaaggacgaaacaccgtaatttctactaagtgtagatccctgaactgcccccagggataatttctactaagtgtagatcgccgaacggataagactattaatttctactaagtgtagatttttttnnnnnnnnnnaagcttggcgtggatccgatatcaactagatcttgagacaaatggcagtattcatccacaattttaaaagaaaaggggggattggggggtacagtgcaggggaaagaatagtagacataatagcaacagacatacaaactaaag

SEQ ID NO: 19588 - DNA, 301 bp, Artificial Sequence
  Trp53.1_NTC.8
  crRNA array
  misc_feature (148)..(157): n is a, c, g, or t
cttggctttatatatcttgtggaaaggacgaaacaccgtaatttctactaagtgtagatccctgaactgcccccagggataatttctactaagtgtagatcgaccgaggttacgctgggataatttctactaagtgtagatttttttnnnnnnnnnnaagcttggcgtggatccgatatcaactagatcttgagacaaatggcagtattcatccacaattttaaaagaaaaggggggattggggggtacagtgcaggggaaagaatagtagacataatagcaacagacatacaaactaaag

SEQ ID NO: 19589 - DNA, 301 bp, Artificial Sequence
  Trp53.1_NTC.9
  crRNA array
  misc_feature (148)..(157): n is a, c, g, or t
cttggctttatatatcttgtggaaaggacgaaacaccgtaatttctactaagtgtagatccctgaactgcccccagggataatttctactaagtgtagatatcgccgtacggctatggcataatttctactaagtgtagatttttttnnnnnnnnnnaagcttggcgtggatccgatatcaactagatcttgagacaaatggcagtattcatccacaattttaaaagaaaaggggggattggggggtacagtgcaggggaaagaatagtagacataatagcaacagacatacaaactaaag

SEQ ID NO: 19590 - DNA, 301 bp, Artificial Sequence
  Trp53.2_NTC.0
  crRNA array
  misc_feature (148)..(157): n is a, c, g, or t
cttggctttatatatcttgtggaaaggacgaaacaccgtaatttctactaagtgtagatgccagggtgagcacgtgggataatttctactaagtgtagattatagcgtcgcgcgctaatttaatttctactaagtgtagatttttttnnnnnnnnnnaagcttggcgtggatccgatatcaactagatcttgagacaaatggcagtattcatccacaattttaaaagaaaaggggggattggggggtacagtgcaggggaaagaatagtagacataatagcaacagacatacaaactaaag

SEQ ID NO: 19591 - DNA, 301 bp, Artificial Sequence
  Trp53.2_NTC.1
  crRNA array
  misc_feature (148)..(157): n is a, c, g, or t
cttggctttatatatcttgtggaaaggacgaaacaccgtaatttctactaagtgtagatgccagggtgagcacgtgggataatttctactaagtgtagatcgcgtaaccgttccggctcctaatttctactaagtgtagatttttttnnnnnnnnnnaagcttggcgtggatccgatatcaactagatcttgagacaaatggcagtattcatccacaattttaaaagaaaaggggggattggggggtacagtgcaggggaaagaatagtagacataatagcaacagacatacaaactaaag

SEQ ID NO: 19592 - DNA, 301 bp, Artificial Sequence
  Trp53.2_NTC.10
  crRNA array
  misc_feature (148)..(157): n is a, c, g, or t
cttggctttatatatcttgtggaaaggacgaaacaccgtaatttctactaagtgtagatgccagggtgagcacgtgggataatttctactaagtgtagatcgctaagttcgcgcgggccgtaatttctactaagtgtagatttttttnnnnnnnnnnaagcttggcgtggatccgatatcaactagatcttgagacaaatggcagtattcatccacaattttaaaagaaaaggggggattggggggtacagtgcaggggaaagaatagtagacataatagcaacagacatacaaactaaag

SEQ ID NO: 19593 - DNA, 301 bp, Artificial Sequence
  Trp53.2_NTC.11
  crRNA array
  misc_feature (148)..(157): n is a, c, g, or t
cttggctttatatatcttgtggaaaggacgaaacaccgtaatttctactaagtgtagatgccagggtgagcacgtgggataatttctactaagtgtagatcgttcgtcgacgaagcaatctaatttctactaagtgtagatttttttnnnnnnnnnnaagcttggcgtggatccgatatcaactagatcttgagacaaatggcagtattcatccacaattttaaaagaaaaggggggattggggggtacagtgcaggggaaagaatagtagacataatagcaacagacatacaaactaaag

SEQ ID NO: 19594 - DNA, 301 bp, Artificial Sequence
  Trp53.2_NTC.12
  crRNA array
  misc_feature (148)..(157): n is a, c, g, or t
cttggctttatatatcttgtggaaaggacgaaacaccgtaatttctactaagtgtagatgccagggtgagcacgtgggataatttctactaagtgtagatcgccgacgattaatcaatagtaatttctactaagtgtagatttttttnnnnnnnnnnaagcttggcgtggatccgatatcaactagatcttgagacaaatggcagtattcatccacaattttaaaagaaaaggggggattggggggtacagtgcaggggaaagaatagtagacataatagcaacagacatacaaactaaag

SEQ ID NO: 19595 - DNA, 301 bp, Artificial Sequence
  Trp53.2_NTC.13
  crRNA array
  misc_feature (148)..(157): n is a, c, g, or t
cttggctttatatatcttgtggaaaggacgaaacaccgtaatttctactaagtgtagatgccagggtgagcacgtgggataatttctactaagtgtagatgaccgttgtatcgcgatcaataatttctactaagtgtagatttttttnnnnnnnnnnaagcttggcgtggatccgatatcaactagatcttgagacaaatggcagtattcatccacaattttaaaagaaaaggggggattggggggtacagtgcaggggaaagaatagtagacataatagcaacagacatacaaactaaag

SEQ ID NO: 19596 - DNA, 301 bp, Artificial Sequence
  Trp53.2_NTC.14
  crRNA array
  misc_feature (148)..(157): n is a, c, g, or t
cttggctttatatatcttgtggaaaggacgaaacaccgtaatttctactaagtgtagatgccagggtgagcacgtgggataatttctactaagtgtagatccgttcgtgcgatagtgttttaatttctactaagtgtagatttttttnnnnnnnnnnaagcttggcgtggatccgatatcaactagatcttgagacaaatggcagtattcatccacaattttaaaagaaaaggggggattggggggtacagtgcaggggaaagaatagtagacataatagcaacagacatacaaactaaag

SEQ ID NO: 19597 - DNA, 301 bp, Artificial Sequence
  Trp53.2_NTC.15
  crRNA array
  misc_feature (148)..(157): n is a, c, g, or t
cttggctttatatatcttgtggaaaggacgaaacaccgtaatttctactaagtgtagatgccagggtgagcacgtgggataatttctactaagtgtagatgttgtcgtgccgcgaatttataatttctactaagtgtagatttttttnnnnnnnnnnaagcttggcgtggatccgatatcaactagatcttgagacaaatggcagtattcatccacaattttaaaagaaaaggggggattggggggtacagtgcaggggaaagaatagtagacataatagcaacagacatacaaactaaag

SEQ ID NO: 19598 - DNA, 301 bp, Artificial Sequence
  Trp53.2_NTC.16
  crRNA array
  misc_feature (148)..(157): n is a, c, g, or t
cttggctttatatatcttgtggaaaggacgaaacaccgtaatttctactaagtgtagatgccagggtgagcacgtgggataatttctactaagtgtagatcggtacgttagacgaaaatttaatttctactaagtgtagatttttttnnnnnnnnnnaagcttggcgtggatccgatatcaactagatcttgagacaaatggcagtattcatccacaattttaaaagaaaaggggggattggggggtacagtgcaggggaaagaatagtagacataatagcaacagacatacaaactaaag

SEQ ID NO: 19599 - DNA, 301 bp, Artificial Sequence
  Trp53.2_NTC.17
  crRNA array
  misc_feature (148)..(157): n is a, c, g, or t
cttggctttatatatcttgtggaaaggacgaaacaccgtaatttctactaagtgtagatgccagggtgagcacgtgggataatttctactaagtgtagattatcgaacgctatcgaacgttaatttctactaagtgtagatttttttnnnnnnnnnnaagcttggcgtggatccgatatcaactagatcttgagacaaatggcagtattcatccacaattttaaaagaaaaggggggattggggggtacagtgcaggggaaagaatagtagacataatagcaacagacatacaaactaaag

SEQ ID NO: 19600 - DNA, 301 bp, Artificial Sequence
  Trp53.2_NTC.18
  crRNA array
  misc_feature (148)..(157): n is a, c, g, or t
cttggctttatatatcttgtggaaaggacgaaacaccgtaatttctactaagtgtagatgccagggtgagcacgtgggataatttctactaagtgtagattccggttacgaccggcaaaataatttctactaagtgtagatttttttnnnnnnnnnnaagcttggcgtggatccgatatcaactagatcttgagacaaatggcagtattcatccacaattttaaaagaaaaggggggattggggggtacagtgcaggggaaagaatagtagacataatagcaacagacatacaaactaaag

SEQ ID NO: 19601 - DNA, 301 bp, Artificial Sequence
  Trp53.2_NTC.19
  crRNA array
  misc_feature (148)..(157): n is a, c, g, or t
cttggctttatatatcttgtggaaaggacgaaacaccgtaatttctactaagtgtagatgccagggtgagcacgtgggataatttctactaagtgtagatcgtcgtagaacgatacccgataatttctactaagtgtagatttttttnnnnnnnnnnaagcttggcgtggatccgatatcaactagatcttgagacaaatggcagtattcatccacaattttaaaagaaaaggggggattggggggtacagtgcaggggaaagaatagtagacataatagcaacagacatacaaactaaag

SEQ ID NO: 19602 - DNA, 301 bp, Artificial Sequence
  Trp53.2_NTC.2
  crRNA array
  misc_feature (148)..(157): n is a, c, g, or t
cttggctttatatatcttgtggaaaggacgaaacaccgtaatttctactaagtgtagatgccagggtgagcacgtgggataatttctactaagtgtagatttatgtcgcgccgcgacccgtaatttctactaagtgtagatttttttnnnnnnnnnnaagcttggcgtggatccgatatcaactagatcttgagacaaatggcagtattcatccacaattttaaaagaaaaggggggattggggggtacagtgcaggggaaagaatagtagacataatagcaacagacatacaaactaaag

SEQ ID NO: 19603 - DNA, 301 bp, Artificial Sequence
  Trp53.2_NTC.20
  crRNA array
  misc_feature (148)..(157): n is a, c, g, or t
cttggctttatatatcttgtggaaaggacgaaacaccgtaatttctactaagtgtagatgccagggtgagcacgtgggataatttctactaagtgtagatattccggcgcgaccagaagataatttctactaagtgtagatttttttnnnnnnnnnnaagcttggcgtggatccgatatcaactagatcttgagacaaatggcagtattcatccacaattttaaaagaaaaggggggattggggggtacagtgcaggggaaagaatagtagacataatagcaacagacatacaaactaaag

SEQ ID NO: 19604 - DNA, 301 bp, Artificial Sequence
  Trp53.2_NTC.21
  crRNA array
  misc_feature (148)..(157): n is a, c, g, or t
cttggctttatatatcttgtggaaaggacgaaacaccgtaatttctactaagtgtagatgccagggtgagcacgtgggataatttctactaagtgtagatgtataacttcgcgcggtccgtaatttctactaagtgtagatttttttnnnnnnnnnnaagcttggcgtggatccgatatcaactagatcttgagacaaatggcagtattcatccacaattttaaaagaaaaggggggattggggggtacagtgcaggggaaagaatagtagacataatagcaacagacatacaaactaaag

SEQ ID NO: 19605 - DNA, 301 bp, Artificial Sequence
  Trp53.2_NTC.22
  crRNA array
  misc_feature (148)..(157): n is a, c, g, or t
cttggctttatatatcttgtggaaaggacgaaacaccgtaatttctactaagtgtagatgccagggtgagcacgtgggataatttctactaagtgtagatgcgcgtcaacgtaatgtgcctaatttctactaagtgtagatttttttnnnnnnnnnnaagcttggcgtggatccgatatcaactagatcttgagacaaatggcagtattcatccacaattttaaaagaaaaggggggattggggggtacagtgcaggggaaagaatagtagacataatagcaacagacatacaaactaaag

SEQ ID NO: 19606 - DNA, 301 bp, Artificial Sequence
  Trp53.2_NTC.23
  crRNA array
  misc_feature (148)..(157): n is a, c, g, or t
cttggctttatatatcttgtggaaaggacgaaacaccgtaatttctactaagtgtagatgccagggtgagcacgtgggataatttctactaagtgtagatacgcgctattatcgtaggtgtaatttctactaagtgtagatttttttnnnnnnnnnnaagcttggcgtggatccgatatcaactagatcttgagacaaatggcagtattcatccacaattttaaaagaaaaggggggattggggggtacagtgcaggggaaagaatagtagacataatagcaacagacatacaaactaaag

SEQ ID NO: 19607 - DNA, 301 bp, Artificial Sequence
  Trp53.2_NTC.24
  crRNA array
  misc_feature (148)..(157): n is a, c, g, or t
cttggctttatatatcttgtggaaaggacgaaacaccgtaatttctactaagtgtagatgccagggtgagcacgtgggataatttctactaagtgtagatactatcgacgttcgtcccggtaatttctactaagtgtagatttttttnnnnnnnnnnaagcttggcgtggatccgatatcaactagatcttgagacaaatggcagtattcatccacaattttaaaagaaaaggggggattggggggtacagtgcaggggaaagaatagtagacataatagcaacagacatacaaactaaag

SEQ ID NO: 19608 - DNA, 301 bp, Artificial Sequence
  Trp53.2_NTC.25
  crRNA array
  misc_feature (148)..(157): n is a, c, g, or t
cttggctttatatatcttgtggaaaggacgaaacaccgtaatttctactaagtgtagatgccagggtgagcacgtgggataatttctactaagtgtagattcgcgttatcgtgccgtgcgtaatttctactaagtgtagatttttttnnnnnnnnnnaagcttggcgtggatccgatatcaactagatcttgagacaaatggcagtattcatccacaattttaaaagaaaaggggggattggggggtacagtgcaggggaaagaatagtagacataatagcaacagacatacaaactaaag

SEQ ID NO: 19609 - DNA, 301 bp, Artificial Sequence
  Trp53.2_NTC.26
  crRNA array
  misc_feature (148)..(157): n is a, c, g, or t
cttggctttatatatcttgtggaaaggacgaaacaccgtaatttctactaagtgtagatgccagggtgagcacgtgggataatttctactaagtgtagatcgcgacggcggttttaacactaatttctactaagtgtagatttttttnnnnnnnnnnaagcttggcgtggatccgatatcaactagatcttgagacaaatggcagtattcatccacaattttaaaagaaaaggggggattggggggtacagtgcaggggaaagaatagtagacataatagcaacagacatacaaactaaag

SEQ ID NO: 19610 - DNA, 301 bp, Artificial Sequence
  Trp53.2_NTC.27
  crRNA array
  misc_feature (148)..(157): n is a, c, g, or t
cttggctttatatatcttgtggaaaggacgaaacaccgtaatttctactaagtgtagatgccagggtgagcacgtgggataatttctactaagtgtagatgtcgcgttgcgaccggcgcttaatttctactaagtgtagatttttttnnnnnnnnnnaagcttggcgtggatccgatatcaactagatcttgagacaaatggcagtattcatccacaattttaaaagaaaaggggggattggggggtacagtgcaggggaaagaatagtagacataatagcaacagacatacaaactaaag

SEQ ID NO: 19611 - DNA, 301 bp, Artificial Sequence
  Trp53.2_NTC.28
  crRNA array
  misc_feature (148)..(157): n is a, c, g, or t
cttggctttatatatcttgtggaaaggacgaaacaccgtaatttctactaagtgtagatgccagggtgagcacgtgggataatttctactaagtgtagataccgctaatcggcgtaaacttaatttctactaagtgtagatttttttnnnnnnnnnnaagcttggcgtggatccgatatcaactagatcttgagacaaatggcagtattcatccacaattttaaaagaaaaggggggattggggggtacagtgcaggggaaagaatagtagacataatagcaacagacatacaaactaaag

SEQ ID NO: 19612 - DNA, 301 bp, Artificial Sequence
  Trp53.2_NTC.29
  crRNA array
  misc_feature (148)..(157): n is a, c, g, or t
cttggctttatatatcttgtggaaaggacgaaacaccgtaatttctactaagtgtagatgccagggtgagcacgtgggataatttctactaagtgtagatcgcgatctataccgtctatataatttctactaagtgtagatttttttnnnnnnnnnnaagcttggcgtggatccgatatcaactagatcttgagacaaatggcagtattcatccacaattttaaaagaaaaggggggattggggggtacagtgcaggggaaagaatagtagacataatagcaacagacatacaaactaaag

SEQ ID NO: 19613 - DNA, 301 bp, Artificial Sequence
  Trp53.2_NTC.3
  crRNA array
  misc_feature (148)..(157): n is a, c, g, or t
cttggctttatatatcttgtggaaaggacgaaacaccgtaatttctactaagtgtagatgccagggtgagcacgtgggataatttctactaagtgtagattcgacgcgagacgacgtacataatttctactaagtgtagatttttttnnnnnnnnnnaagcttggcgtggatccgatatcaactagatcttgagacaaatggcagtattcatccacaattttaaaagaaaaggggggattggggggtacagtgcaggggaaagaatagtagacataatagcaacagacatacaaactaaag

SEQ ID NO: 19614 - DNA, 301 bp, Artificial Sequence
  Trp53.2_NTC.30
  crRNA array
  misc_feature (148)..(157): n is a, c, g, or t
cttggctttatatatcttgtggaaaggacgaaacaccgtaatttctactaagtgtagatgccagggtgagcacgtgggataatttctactaagtgtagatcgatcgtacgggtgtcctaataatttctactaagtgtagatttttttnnnnnnnnnnaagcttggcgtggatccgatatcaactagatcttgagacaaatggcagtattcatccacaattttaaaagaaaaggggggattggggggtacagtgcaggggaaagaatagtagacataatagcaacagacatacaaactaaag

SEQ ID NO: 19615 - DNA, 301 bp, Artificial Sequence
  Trp53.2_NTC.31
  crRNA array
  misc_feature (148)..(157): n is a, c, g, or t
cttggctttatatatcttgtggaaaggacgaaacaccgtaatttctactaagtgtagatgccagggtgagcacgtgggataatttctactaagtgtagatgccgaccgcgtgattgtaggtaatttctactaagtgtagatttttttnnnnnnnnnnaagcttggcgtggatccgatatcaactagatcttgagacaaatggcagtattcatccacaattttaaaagaaaaggggggattggggggtacagtgcaggggaaagaatagtagacataatagcaacagacatacaaactaaag

SEQ ID NO: 19616 - DNA, 301 bp, Artificial Sequence
  Trp53.2_NTC.32
  crRNA array
  misc_feature (148)..(157): n is a, c, g, or t
cttggctttatatatcttgtggaaaggacgaaacaccgtaatttctactaagtgtagatgccagggtgagcacgtgggataatttctactaagtgtagatgcacgttacgcccgggtcactaatttctactaagtgtagatttttttnnnnnnnnnnaagcttggcgtggatccgatatcaactagatcttgagacaaatggcagtattcatccacaattttaaaagaaaaggggggattggggggtacagtgcaggggaaagaatagtagacataatagcaacagacatacaaactaaag

SEQ ID NO: 19617 - DNA, 301 bp, Artificial Sequence
  Trp53.2_NTC.33
  crRNA array
  misc_feature (148)..(157): n is a, c, g, or t
cttggctttatatatcttgtggaaaggacgaaacaccgtaatttctactaagtgtagatgccagggtgagcacgtgggataatttctactaagtgtagattaagcgaccgacgcattcgctaatttctactaagtgtagatttttttnnnnnnnnnnaagcttggcgtggatccgatatcaactagatcttgagacaaatggcagtattcatccacaattttaaaagaaaaggggggattggggggtacagtgcaggggaaagaatagtagacataatagcaacagacatacaaactaaag

SEQ ID NO: 19618 - DNA, 301 bp, Artificial Sequence
  Trp53.2_NTC.34
  crRNA array
  misc_feature (148)..(157): n is a, c, g, or t
cttggctttatatatcttgtggaaaggacgaaacaccgtaatttctactaagtgtagatgccagggtgagcacgtgggataatttctactaagtgtagattagcgttcgacacgtgaaactaatttctactaagtgtagatttttttnnnnnnnnnnaagcttggcgtggatccgatatcaactagatcttgagacaaatggcagtattcatccacaattttaaaagaaaaggggggattggggggtacagtgcaggggaaagaatagtagacataatagcaacagacatacaaactaaag

SEQ ID NO: 19619 - DNA, 301 bp, Artificial Sequence
  Trp53.2_NTC.35
  crRNA array
  misc_feature (148)..(157): n is a, c, g, or t
cttggctttatatatcttgtggaaaggacgaaacaccgtaatttctactaagtgtagatgccagggtgagcacgtgggataatttctactaagtgtagattggcgcgtaatcgctattcgtaatttctactaagtgtagatttttttnnnnnnnnnnaagcttggcgtggatccgatatcaactagatcttgagacaaatggcagtattcatccacaattttaaaagaaaaggggggattggggggtacagtgcaggggaaagaatagtagacataatagcaacagacatacaaactaaag

SEQ ID NO: 19620 - DNA, 301 bp, Artificial Sequence
  Trp53.2_NTC.36
  crRNA array
  misc_feature (148)..(157): n is a, c, g, or t
cttggctttatatatcttgtggaaaggacgaaacaccgtaatttctactaagtgtagatgccagggtgagcacgtgggataatttctactaagtgtagatcaacccgccgtagcgggccttaatttctactaagtgtagatttttttnnnnnnnnnnaagcttggcgtggatccgatatcaactagatcttgagacaaatggcagtattcatccacaattttaaaagaaaaggggggattggggggtacagtgcaggggaaagaatagtagacataatagcaacagacatacaaactaaag

SEQ ID NO: 19621 - DNA, 301 bp, Artificial Sequence
  Trp53.2_NTC.37
  crRNA array
  misc_feature (148)..(157): n is a, c, g, or t
cttggctttatatatcttgtggaaaggacgaaacaccgtaatttctactaagtgtagatgccagggtgagcacgtgggataatttctactaagtgtagattttgcgttgacgcgattacttaatttctactaagtgtagatttttttnnnnnnnnnnaagcttggcgtggatccgatatcaactagatcttgagacaaatggcagtattcatccacaattttaaaagaaaaggggggattggggggtacagtgcaggggaaagaatagtagacataatagcaacagacatacaaactaaag

SEQ ID NO: 19622 - DNA, 301 bp, Artificial Sequence
  Trp53.2_NTC.38
  crRNA array
  misc_feature (148)..(157): n is a, c, g, or t
cttggctttatatatcttgtggaaaggacgaaacaccgtaatttctactaagtgtagatgccagggtgagcacgtgggataatttctactaagtgtagataacggagcgcgatactaccataatttctactaagtgtagatttttttnnnnnnnnnnaagcttggcgtggatccgatatcaactagatcttgagacaaatggcagtattcatccacaattttaaaagaaaaggggggattggggggtacagtgcaggggaaagaatagtagacataatagcaacagacatacaaactaaag

SEQ ID NO: 19623 - DNA, 301 bp, Artificial Sequence
  Trp53.2_NTC.39
  crRNA array
  misc_feature (148)..(157): n is a, c, g, or t
cttggctttatatatcttgtggaaaggacgaaacaccgtaatttctactaagtgtagatgccagggtgagcacgtgggataatttctactaagtgtagatccggacgttataacgtttcttaatttctactaagtgtagatttttttnnnnnnnnnnaagcttggcgtggatccgatatcaactagatcttgagacaaatggcagtattcatccacaattttaaaagaaaaggggggattggggggtacagtgcaggggaaagaatagtagacataatagcaacagacatacaaactaaag

SEQ ID NO: 19624 - DNA, 301 bp, Artificial Sequence
  Trp53.2_NTC.4
  crRNA array
  misc_feature (148)..(157): n is a, c, g, or t
cttggctttatatatcttgtggaaaggacgaaacaccgtaatttctactaagtgtagatgccagggtgagcacgtgggataatttctactaagtgtagatatacccgtcgcgaacgtgagtaatttctactaagtgtagatttttttnnnnnnnnnnaagcttggcgtggatccgatatcaactagatcttgagacaaatggcagtattcatccacaattttaaaagaaaaggggggattggggggtacagtgcaggggaaagaatagtagacataatagcaacagacatacaaactaaag

SEQ ID NO: 19625 - DNA, 301 bp, Artificial Sequence
  Trp53.2_NTC.40
  crRNA array
  misc_feature (148)..(157): n is a, c, g, or t
cttggctttatatatcttgtggaaaggacgaaacaccgtaatttctactaagtgtagatgccagggtgagcacgtgggataatttctactaagtgtagatattcgcgaacccggccggaataatttctactaagtgtagatttttttnnnnnnnnnnaagcttggcgtggatccgatatcaactagatcttgagacaaatggcagtattcatccacaattttaaaagaaaaggggggattggggggtacagtgcaggggaaagaatagtagacataatagcaacagacatacaaactaaag

SEQ ID NO: 19626 - DNA, 301 bp, Artificial Sequence
  Trp53.2_NTC.41
  crRNA array
  misc_feature (148)..(157): n is a, c, g, or t
cttggctttatatatcttgtggaaaggacgaaacaccgtaatttctactaagtgtagatgccagggtgagcacgtgggataatttctactaagtgtagatttgatggcgcgacgcgttattaatttctactaagtgtagatttttttnnnnnnnnnnaagcttggcgtggatccgatatcaactagatcttgagacaaatggcagtattcatccacaattttaaaagaaaaggggggattggggggtacagtgcaggggaaagaatagtagacataatagcaacagacatacaaactaaag

SEQ ID NO: 19627 - DNA, 301 bp, Artificial Sequence
  Trp53.2_NTC.42
  crRNA array
  misc_feature (148)..(157): n is a, c, g, or t
cttggctttatatatcttgtggaaaggacgaaacaccgtaatttctactaagtgtagatgccagggtgagcacgtgggataatttctactaagtgtagatggtcaaatcgcggcgataactaatttctactaagtgtagatttttttnnnnnnnnnnaagcttggcgtggatccgatatcaactagatcttgagacaaatggcagtattcatccacaattttaaaagaaaaggggggattggggggtacagtgcaggggaaagaatagtagacataatagcaacagacatacaaactaaag

SEQ ID NO: 19628 - DNA, 301 bp, Artificial Sequence
  Trp53.2_NTC.43
  crRNA array
  misc_feature (148)..(157): n is a, c, g, or t
cttggctttatatatcttgtggaaaggacgaaacaccgtaatttctactaagtgtagatgccagggtgagcacgtgggataatttctactaagtgtagatcgactcgcgcattgaactggtaatttctactaagtgtagatttttttnnnnnnnnnnaagcttggcgtggatccgatatcaactagatcttgagacaaatggcagtattcatccacaattttaaaagaaaaggggggattggggggtacagtgcaggggaaagaatagtagacataatagcaacagacatacaaactaaag

SEQ ID NO: 19629 - DNA, 301 bp, Artificial Sequence
  Trp53.2_NTC.44
  crRNA array
  misc_feature (148)..(157): n is a, c, g, or t
cttggctttatatatcttgtggaaaggacgaaacaccgtaatttctactaagtgtagatgccagggtgagcacgtgggataatttctactaagtgtagatagcgtcgtacgatttatcgttaatttctactaagtgtagatttttttnnnnnnnnnnaagcttggcgtggatccgatatcaactagatcttgagacaaatggcagtattcatccacaattttaaaagaaaaggggggattggggggtacagtgcaggggaaagaatagtagacataatagcaacagacatacaaactaaag

SEQ ID NO: 19630 - DNA, 301 bp, Artificial Sequence
  Trp53.2_NTC.45
  crRNA array
  misc_feature (148)..(157): n is a, c, g, or t
cttggctttatatatcttgtggaaaggacgaaacaccgtaatttctactaagtgtagatgccagggtgagcacgtgggataatttctactaagtgtagatcggaacgcgtgatactagggtaatttctactaagtgtagatttttttnnnnnnnnnnaagcttggcgtggatccgatatcaactagatcttgagacaaatggcagtattcatccacaattttaaaagaaaaggggggattggggggtacagtgcaggggaaagaatagtagacataatagcaacagacatacaaactaaag

SEQ ID NO: 19631 - DNA, 301 bp, Artificial Sequence
  Trp53.2_NTC.46
  crRNA array
  misc_feature (148)..(157): n is a, c, g, or t
cttggctttatatatcttgtggaaaggacgaaacaccgtaatttctactaagtgtagatgccagggtgagcacgtgggataatttctactaagtgtagatagcgggtcgtagacgcgcggtaatttctactaagtgtagatttttttnnnnnnnnnnaagcttggcgtggatccgatatcaactagatcttgagacaaatggcagtattcatccacaattttaaaagaaaaggggggattggggggtacagtgcaggggaaagaatagtagacataatagcaacagacatacaaactaaag

SEQ ID NO: 19632 - DNA, 301 bp, Artificial Sequence
  Trp53.2_NTC.47
  crRNA array
  misc_feature (148)..(157): n is a, c, g, or t
cttggctttatatatcttgtggaaaggacgaaacaccgtaatttctactaagtgtagatgccagggtgagcacgtgggataatttctactaagtgtagattctcgtatcgcgattgttaataatttctactaagtgtagatttttttnnnnnnnnnnaagcttggcgtggatccgatatcaactagatcttgagacaaatggcagtattcatccacaattttaaaagaaaaggggggattggggggtacagtgcaggggaaagaatagtagacataatagcaacagacatacaaactaaag

SEQ ID NO: 19633 - DNA, 301 bp, Artificial Sequence
  Trp53.2_NTC.48
  crRNA array
  misc_feature (148)..(157): n is a, c, g, or t
cttggctttatatatcttgtggaaaggacgaaacaccgtaatttctactaagtgtagatgccagggtgagcacgtgggataatttctactaagtgtagatcggtcgactacggctgttagtaatttctactaagtgtagatttttttnnnnnnnnnnaagcttggcgtggatccgatatcaactagatcttgagacaaatggcagtattcatccacaattttaaaagaaaaggggggattggggggtacagtgcaggggaaagaatagtagacataatagcaacagacatacaaactaaag

SEQ ID NO: 19634 - DNA, 301 bp, Artificial Sequence
  Trp53.2_NTC.49
  crRNA array
  misc_feature (148)..(157): n is a, c, g, or t
cttggctttatatatcttgtggaaaggacgaaacaccgtaatttctactaagtgtagatgccagggtgagcacgtgggataatttctactaagtgtagattcggggcgcgtcaactgaattaatttctactaagtgtagatttttttnnnnnnnnnnaagcttggcgtggatccgatatcaactagatcttgagacaaatggcagtattcatccacaattttaaaagaaaaggggggattggggggtacagtgcaggggaaagaatagtagacataatagcaacagacatacaaactaaag

SEQ ID NO: 19635 - DNA, 301 bp, Artificial Sequence
  Trp53.2_NTC.5
  crRNA array
  misc_feature (148)..(157): n is a, c, g, or t
cttggctttatatatcttgtggaaaggacgaaacaccgtaatttctactaagtgtagatgccagggtgagcacgtgggataatttctactaagtgtagatgcttacgcgtcgcgaatgtataatttctactaagtgtagatttttttnnnnnnnnnnaagcttggcgtggatccgatatcaactagatcttgagacaaatggcagtattcatccacaattttaaaagaaaaggggggattggggggtacagtgcaggggaaagaatagtagacataatagcaacagacatacaaactaaag

SEQ ID NO: 19636 - DNA, 301 bp, Artificial Sequence
  Trp53.2_NTC.50
  crRNA array
  misc_feature (148)..(157): n is a, c, g, or t
cttggctttatatatcttgtggaaaggacgaaacaccgtaatttctactaagtgtagatgccagggtgagcacgtgggataatttctactaagtgtagatattgccgctcgcgcaaaatctaatttctactaagtgtagatttttttnnnnnnnnnnaagcttggcgtggatccgatatcaactagatcttgagacaaatggcagtattcatccacaattttaaaagaaaaggggggattggggggtacagtgcaggggaaagaatagtagacataatagcaacagacatacaaactaaag

SEQ ID NO: 19637 - DNA, 301 bp, Artificial Sequence
  Trp53.2_NTC.51
  crRNA array
  misc_feature (148)..(157): n is a, c, g, or t
cttggctttatatatcttgtggaaaggacgaaacaccgtaatttctactaagtgtagatgccagggtgagcacgtgggataatttctactaagtgtagattaacgcgcaacacgccaatgtaatttctactaagtgtagatttttttnnnnnnnnnnaagcttggcgtggatccgatatcaactagatcttgagacaaatggcagtattcatccacaattttaaaagaaaaggggggattggggggtacagtgcaggggaaagaatagtagacataatagcaacagacatacaaactaaag

SEQ ID NO: 19638 - DNA, 301 bp, Artificial Sequence
  Trp53.2_NTC.6
  crRNA array
  misc_feature (148)..(157): n is a, c, g, or t
cttggctttatatatcttgtggaaaggacgaaacaccgtaatttctactaagtgtagatgccagggtgagcacgtgggataatttctactaagtgtagatcgaatcgcgcctacgggaattaatttctactaagtgtagatttttttnnnnnnnnnnaagcttggcgtggatccgatatcaactagatcttgagacaaatggcagtattcatccacaattttaaaagaaaaggggggattggggggtacagtgcaggggaaagaatagtagacataatagcaacagacatacaaactaaag

SEQ ID NO: 19639 - DNA, 301 bp, Artificial Sequence
  Trp53.2_NTC.7
  crRNA array
  misc_feature (148)..(157): n is a, c, g, or t
cttggctttatatatcttgtggaaaggacgaaacaccgtaatttctactaagtgtagatgccagggtgagcacgtgggataatttctactaagtgtagatcgccgaacggataagactattaatttctactaagtgtagatttttttnnnnnnnnnnaagcttggcgtggatccgatatcaactagatcttgagacaaatggcagtattcatccacaattttaaaagaaaaggggggattggggggtacagtgcaggggaaagaatagtagacataatagcaacagacatacaaactaaag

SEQ ID NO: 19640 - DNA, 301 bp, Artificial Sequence
  Trp53.2_NTC.8
  crRNA array
  misc_feature (148)..(157): n is a, c, g, or t
cttggctttatatatcttgtggaaaggacgaaacaccgtaatttctactaagtgtagatgccagggtgagcacgtgggataatttctactaagtgtagatcgaccgaggttacgctgggataatttctactaagtgtagatttttttnnnnnnnnnnaagcttggcgtggatccgatatcaactagatcttgagacaaatggcagtattcatccacaattttaaaagaaaaggggggattggggggtacagtgcaggggaaagaatagtagacataatagcaacagacatacaaactaaag

SEQ ID NO: 19641 - DNA, 301 bp, Artificial Sequence
  Trp53.2_NTC.9
  crRNA array
  misc_feature (148)..(157): n is a, c, g, or t
cttggctttatatatcttgtggaaaggacgaaacaccgtaatttctactaagtgtagatgccagggtgagcacgtgggataatttctactaagtgtagatatcgccgtacggctatggcataatttctactaagtgtagatttttttnnnnnnnnnnaagcttggcgtggatccgatatcaactagatcttgagacaaatggcagtattcatccacaattttaaaagaaaaggggggattggggggtacagtgcaggggaaagaatagtagacataatagcaacagacatacaaactaaag

SEQ ID NO: 19642 - DNA, 301 bp, Artificial Sequence
  Trp53.3_NTC.0
  crRNA array
  misc_feature (148)..(157): n is a, c, g, or t
cttggctttatatatcttgtggaaaggacgaaacaccgtaatttctactaagtgtagatccctcccacgtgctcacccttaatttctactaagtgtagattatagcgtcgcgcgctaatttaatttctactaagtgtagatttttttnnnnnnnnnnaagcttggcgtggatccgatatcaactagatcttgagacaaatggcagtattcatccacaattttaaaagaaaaggggggattggggggtacagtgcaggggaaagaatagtagacataatagcaacagacatacaaactaaag

SEQ ID NO: 19643 - DNA, 301 bp, Artificial Sequence
  Trp53.3_NTC.1
  crRNA array
  misc_feature (148)..(157): n is a, c, g, or t
cttggctttatatatcttgtggaaaggacgaaacaccgtaatttctactaagtgtagatccctcccacgtgctcacccttaatttctactaagtgtagatcgcgtaaccgttccggctcctaatttctactaagtgtagatttttttnnnnnnnnnnaagcttggcgtggatccgatatcaactagatcttgagacaaatggcagtattcatccacaattttaaaagaaaaggggggattggggggtacagtgcaggggaaagaatagtagacataatagcaacagacatacaaactaaag

SEQ ID NO: 19644 - DNA, 301 bp, Artificial Sequence
  Trp53.3_NTC.10
  crRNA array
  misc_feature (148)..(157): n is a, c, g, or t
cttggctttatatatcttgtggaaaggacgaaacaccgtaatttctactaagtgtagatccctcccacgtgctcacccttaatttctactaagtgtagatcgctaagttcgcgcgggccgtaatttctactaagtgtagatttttttnnnnnnnnnnaagcttggcgtggatccgatatcaactagatcttgagacaaatggcagtattcatccacaattttaaaagaaaaggggggattggggggtacagtgcaggggaaagaatagtagacataatagcaacagacatacaaactaaag

SEQ ID NO: 19645 - DNA, 301 bp, Artificial Sequence
  Trp53.3_NTC.11
  crRNA array
  misc_feature (148)..(157): n is a, c, g, or t
cttggctttatatatcttgtggaaaggacgaaacaccgtaatttctactaagtgtagatccctcccacgtgctcacccttaatttctactaagtgtagatcgttcgtcgacgaagcaatctaatttctactaagtgtagatttttttnnnnnnnnnnaagcttggcgtggatccgatatcaactagatcttgagacaaatggcagtattcatccacaattttaaaagaaaaggggggattggggggtacagtgcaggggaaagaatagtagacataatagcaacagacatacaaactaaag

SEQ ID NO: 19646 - DNA, 301 bp, Artificial Sequence
  Trp53.3_NTC.12
  crRNA array
  misc_feature (148)..(157): n is a, c, g, or t
cttggctttatatatcttgtggaaaggacgaaacaccgtaatttctactaagtgtagatccctcccacgtgctcacccttaatttctactaagtgtagatcgccgacgattaatcaatagtaatttctactaagtgtagatttttttnnnnnnnnnnaagcttggcgtggatccgatatcaactagatcttgagacaaatggcagtattcatccacaattttaaaagaaaaggggggattggggggtacagtgcaggggaaagaatagtagacataatagcaacagacatacaaactaaag

SEQ ID NO: 19647 - DNA, 301 bp, Artificial Sequence
  Trp53.3_NTC.13
  crRNA array
  misc_feature (148)..(157): n is a, c, g, or t
cttggctttatatatcttgtggaaaggacgaaacaccgtaatttctactaagtgtagatccctcccacgtgctcacccttaatttctactaagtgtagatgaccgttgtatcgcgatcaataatttctactaagtgtagatttttttnnnnnnnnnnaagcttggcgtggatccgatatcaactagatcttgagacaaatggcagtattcatccacaattttaaaagaaaaggggggattggggggtacagtgcaggggaaagaatagtagacataatagcaacagacatacaaactaaag

SEQ ID NO: 19648 - DNA, 301 bp, Artificial Sequence
  Trp53.3_NTC.14
  crRNA array
  misc_feature (148)..(157): n is a, c, g, or t
cttggctttatatatcttgtggaaaggacgaaacaccgtaatttctactaagtgtagatccctcccacgtgctcacccttaatttctactaagtgtagatccgttcgtgcgatagtgttttaatttctactaagtgtagatttttttnnnnnnnnnnaagcttggcgtggatccgatatcaactagatcttgagacaaatggcagtattcatccacaattttaaaagaaaaggggggattggggggtacagtgcaggggaaagaatagtagacataatagcaacagacatacaaactaaag

SEQ ID NO: 19649 - DNA, 301 bp, Artificial Sequence
  Trp53.3_NTC.15
  crRNA array
  misc_feature (148)..(157): n is a, c, g, or t
cttggctttatatatcttgtggaaaggacgaaacaccgtaatttctactaagtgtagatccctcccacgtgctcacccttaatttctactaagtgtagatgttgtcgtgccgcgaatttataatttctactaagtgtagatttttttnnnnnnnnnnaagcttggcgtggatccgatatcaactagatcttgagacaaatggcagtattcatccacaattttaaaagaaaaggggggattggggggtacagtgcaggggaaagaatagtagacataatagcaacagacatacaaactaaag

SEQ ID NO: 19650 - DNA, 301 bp, Artificial Sequence
  Trp53.3_NTC.16
  crRNA array
  misc_feature (148)..(157): n is a, c, g, or t
cttggctttatatatcttgtggaaaggacgaaacaccgtaatttctactaagtgtagatccctcccacgtgctcacccttaatttctactaagtgtagatcggtacgttagacgaaaatttaatttctactaagtgtagatttttttnnnnnnnnnnaagcttggcgtggatccgatatcaactagatcttgagacaaatggcagtattcatccacaattttaaaagaaaaggggggattggggggtacagtgcaggggaaagaatagtagacataatagcaacagacatacaaactaaag

SEQ ID NO: 19651 - DNA, 301 bp, Artificial Sequence
  Trp53.3_NTC.17
  crRNA array
  misc_feature (148)..(157): n is a, c, g, or t
cttggctttatatatcttgtggaaaggacgaaacaccgtaatttctactaagtgtagatccctcccacgtgctcacccttaatttctactaagtgtagattatcgaacgctatcgaacgttaatttctactaagtgtagatttttttnnnnnnnnnnaagcttggcgtggatccgatatcaactagatcttgagacaaatggcagtattcatccacaattttaaaagaaaaggggggattggggggtacagtgcaggggaaagaatagtagacataatagcaacagacatacaaactaaag

SEQ ID NO: 19652 - DNA, 301 bp, Artificial Sequence
  Trp53.3_NTC.18
  crRNA array
  misc_feature (148)..(157): n is a, c, g, or t
cttggctttatatatcttgtggaaaggacgaaacaccgtaatttctactaagtgtagatccctcccacgtgctcacccttaatttctactaagtgtagattccggttacgaccggcaaaataatttctactaagtgtagatttttttnnnnnnnnnnaagcttggcgtggatccgatatcaactagatcttgagacaaatggcagtattcatccacaattttaaaagaaaaggggggattggggggtacagtgcaggggaaagaatagtagacataatagcaacagacatacaaactaaag

SEQ ID NO: 19653 - DNA, 301 bp, Artificial Sequence
  Trp53.3_NTC.19
  crRNA array
  misc_feature (148)..(157): n is a, c, g, or t
cttggctttatatatcttgtggaaaggacgaaacaccgtaatttctactaagtgtagatccctcccacgtgctcacccttaatttctactaagtgtagatcgtcgtagaacgatacccgataatttctactaagtgtagatttttttnnnnnnnnnnaagcttggcgtggatccgatatcaactagatcttgagacaaatggcagtattcatccacaattttaaaagaaaaggggggattggggggtacagtgcaggggaaagaatagtagacataatagcaacagacatacaaactaaag

SEQ ID NO: 19654 - DNA, 301 bp, Artificial Sequence
  Trp53.3_NTC.2
  crRNA array
  misc_feature (148)..(157): n is a, c, g, or t
cttggctttatatatcttgtggaaaggacgaaacaccgtaatttctactaagtgtagatccctcccacgtgctcacccttaatttctactaagtgtagatttatgtcgcgccgcgacccgtaatttctactaagtgtagatttttttnnnnnnnnnnaagcttggcgtggatccgatatcaactagatcttgagacaaatggcagtattcatccacaattttaaaagaaaaggggggattggggggtacagtgcaggggaaagaatagtagacataatagcaacagacatacaaactaaag

SEQ ID NO: 19655 - DNA, 301 bp, Artificial Sequence
  Trp53.3_NTC.20
  crRNA array
  misc_feature (148)..(157): n is a, c, g, or t
cttggctttatatatcttgtggaaaggacgaaacaccgtaatttctactaagtgtagatccctcccacgtgctcacccttaatttctactaagtgtagatattccggcgcgaccagaagataatttctactaagtgtagatttttttnnnnnnnnnnaagcttggcgtggatccgatatcaactagatcttgagacaaatggcagtattcatccacaattttaaaagaaaaggggggattggggggtacagtgcaggggaaagaatagtagacataatagcaacagacatacaaactaaag

SEQ ID NO: 19656 - DNA, 301 bp, Artificial Sequence
  Trp53.3_NTC.21
  crRNA array
  misc_feature (148)..(157): n is a, c, g, or t
cttggctttatatatcttgtggaaaggacgaaacaccgtaatttctactaagtgtagatccctcccacgtgctcacccttaatttctactaagtgtagatgtataacttcgcgcggtccgtaatttctactaagtgtagatttttttnnnnnnnnnnaagcttggcgtggatccgatatcaactagatcttgagacaaatggcagtattcatccacaattttaaaagaaaaggggggattggggggtacagtgcaggggaaagaatagtagacataatagcaacagacatacaaactaaag

SEQ ID NO: 19657 - DNA, 301 bp, Artificial Sequence
  Trp53.3_NTC.22
  crRNA array
  misc_feature (148)..(157): n is a, c, g, or t
cttggctttatatatcttgtggaaaggacgaaacaccgtaatttctactaagtgtagatccctcccacgtgctcacccttaatttctactaagtgtagatgcgcgtcaacgtaatgtgcctaatttctactaagtgtagatttttttnnnnnnnnnnaagcttggcgtggatccgatatcaactagatcttgagacaaatggcagtattcatccacaattttaaaagaaaaggggggattggggggtacagtgcaggggaaagaatagtagacataatagcaacagacatacaaactaaag

SEQ ID NO: 19658 - DNA, 301 bp, Artificial Sequence
  Trp53.3_NTC.23
  crRNA array
  misc_feature (148)..(157): n is a, c, g, or t
cttggctttatatatcttgtggaaaggacgaaacaccgtaatttctactaagtgtagatccctcccacgtgctcacccttaatttctactaagtgtagatacgcgctattatcgtaggtgtaatttctactaagtgtagatttttttnnnnnnnnnnaagcttggcgtggatccgatatcaactagatcttgagacaaatggcagtattcatccacaattttaaaagaaaaggggggattggggggtacagtgcaggggaaagaatagtagacataatagcaacagacatacaaactaaag

SEQ ID NO: 19659 - DNA, 301 bp, Artificial Sequence
  Trp53.3_NTC.24
  crRNA array
  misc_feature (148)..(157): n is a, c, g, or t
cttggctttatatatcttgtggaaaggacgaaacaccgtaatttctactaagtgtagatccctcccacgtgctcacccttaatttctactaagtgtagatactatcgacgttcgtcccggtaatttctactaagtgtagatttttttnnnnnnnnnnaagcttggcgtggatccgatatcaactagatcttgagacaaatggcagtattcatccacaattttaaaagaaaaggggggattggggggtacagtgcaggggaaagaatagtagacataatagcaacagacatacaaactaaag

SEQ ID NO: 19660 - DNA, 301 bp, Artificial Sequence
  Trp53.3_NTC.25
  crRNA array
  misc_feature (148)..(157): n is a, c, g, or t
cttggctttatatatcttgtggaaaggacgaaacaccgtaatttctactaagtgtagatccctcccacgtgctcacccttaatttctactaagtgtagattcgcgttatcgtgccgtgcgtaatttctactaagtgtagatttttttnnnnnnnnnnaagcttggcgtggatccgatatcaactagatcttgagacaaatggcagtattcatccacaattttaaaagaaaaggggggattggggggtacagtgcaggggaaagaatagtagacataatagcaacagacatacaaactaaag

SEQ ID NO: 19661 - DNA, 301 bp, Artificial Sequence
  Trp53.3_NTC.26
  crRNA array
  misc_feature (148)..(157): n is a, c, g, or t
cttggctttatatatcttgtggaaaggacgaaacaccgtaatttctactaagtgtagatccctcccacgtgctcacccttaatttctactaagtgtagatcgcgacggcggttttaacactaatttctactaagtgtagatttttttnnnnnnnnnnaagcttggcgtggatccgatatcaactagatcttgagacaaatggcagtattcatccacaattttaaaagaaaaggggggattggggggtacagtgcaggggaaagaatagtagacataatagcaacagacatacaaactaaag

SEQ ID NO: 19662 - DNA, 301 bp, Artificial Sequence
  Trp53.3_NTC.27
  crRNA array
  misc_feature (148)..(157): n is a, c, g, or t
cttggctttatatatcttgtggaaaggacgaaacaccgtaatttctactaagtgtagatccctcccacgtgctcacccttaatttctactaagtgtagatgtcgcgttgcgaccggcgcttaatttctactaagtgtagatttttttnnnnnnnnnnaagcttggcgtggatccgatatcaactagatcttgagacaaatggcagtattcatccacaattttaaaagaaaaggggggattggggggtacagtgcaggggaaagaatagtagacataatagcaacagacatacaaactaaag

SEQ ID NO: 19663 - DNA, 301 bp, Artificial Sequence
  Trp53.3_NTC.28
  crRNA array
  misc_feature (148)..(157): n is a, c, g, or t
cttggctttatatatcttgtggaaaggacgaaacaccgtaatttctactaagtgtagatccctcccacgtgctcacccttaatttctactaagtgtagataccgctaatcggcgtaaacttaatttctactaagtgtagatttttttnnnnnnnnnnaagcttggcgtggatccgatatcaactagatcttgagacaaatggcagtattcatccacaattttaaaagaaaaggggggattggggggtacagtgcaggggaaagaatagtagacataatagcaacagacatacaaactaaag

SEQ ID NO: 19664 - DNA, 301 bp, Artificial Sequence
  Trp53.3_NTC.29
  crRNA array
  misc_feature (148)..(157): n is a, c, g, or t
cttggctttatatatcttgtggaaaggacgaaacaccgtaatttctactaagtgtagatccctcccacgtgctcacccttaatttctactaagtgtagatcgcgatctataccgtctatataatttctactaagtgtagatttttttnnnnnnnnnnaagcttggcgtggatccgatatcaactagatcttgagacaaatggcagtattcatccacaattttaaaagaaaaggggggattggggggtacagtgcaggggaaagaatagtagacataatagcaacagacatacaaactaaag

SEQ ID NO: 19665 - DNA, 301 bp, Artificial Sequence
  Trp53.3_NTC.3
  crRNA array
  misc_feature (148)..(157): n is a, c, g, or t
cttggctttatatatcttgtggaaaggacgaaacaccgtaatttctactaagtgtagatccctcccacgtgctcacccttaatttctactaagtgtagattcgacgcgagacgacgtacataatttctactaagtgtagatttttttnnnnnnnnnnaagcttggcgtggatccgatatcaactagatcttgagacaaatggcagtattcatccacaattttaaaagaaaaggggggattggggggtacagtgcaggggaaagaatagtagacataatagcaacagacatacaaactaaag

SEQ ID NO: 19666 - DNA, 301 bp, Artificial Sequence
  Trp53.3_NTC.30
  crRNA array
  misc_feature (148)..(157): n is a, c, g, or t
cttggctttatatatcttgtggaaaggacgaaacaccgtaatttctactaagtgtagatccctcccacgtgctcacccttaatttctactaagtgtagatcgatcgtacgggtgtcctaataatttctactaagtgtagatttttttnnnnnnnnnnaagcttggcgtggatccgatatcaactagatcttgagacaaatggcagtattcatccacaattttaaaagaaaaggggggattggggggtacagtgcaggggaaagaatagtagacataatagcaacagacatacaaactaaag

SEQ ID NO: 19667 - DNA, 301 bp, Artificial Sequence
  Trp53.3_NTC.31
  crRNA array
  misc_feature (148)..(157): n is a, c, g, or t
cttggctttatatatcttgtggaaaggacgaaacaccgtaatttctactaagtgtagatccctcccacgtgctcacccttaatttctactaagtgtagatgccgaccgcgtgattgtaggtaatttctactaagtgtagatttttttnnnnnnnnnnaagcttggcgtggatccgatatcaactagatcttgagacaaatggcagtattcatccacaattttaaaagaaaaggggggattggggggtacagtgcaggggaaagaatagtagacataatagcaacagacatacaaactaaag

SEQ ID NO: 19668 - DNA, 301 bp, Artificial Sequence
  Trp53.3_NTC.32
  crRNA array
  misc_feature (148)..(157): n is a, c, g, or t
cttggctttatatatcttgtggaaaggacgaaacaccgtaatttctactaagtgtagatccctcccacgtgctcacccttaatttctactaagtgtagatgcacgttacgcccgggtcactaatttctactaagtgtagatttttttnnnnnnnnnnaagcttggcgtggatccgatatcaactagatcttgagacaaatggcagtattcatccacaattttaaaagaaaaggggggattggggggtacagtgcaggggaaagaatagtagacataatagcaacagacatacaaactaaag

SEQ ID NO: 19669 - DNA, 301 bp, Artificial Sequence
  Trp53.3_NTC.33
  crRNA array
  misc_feature (148)..(157): n is a, c, g, or t
cttggctttatatatcttgtggaaaggacgaaacaccgtaatttctactaagtgtagatccctcccacgtgctcacccttaatttctactaagtgtagattaagcgaccgacgcattcgctaatttctactaagtgtagatttttttnnnnnnnnnnaagcttggcgtggatccgatatcaactagatcttgagacaaatggcagtattcatccacaattttaaaagaaaaggggggattggggggtacagtgcaggggaaagaatagtagacataatagcaacagacatacaaactaaag

SEQ ID NO: 19670 - DNA, 301 bp, Artificial Sequence
  Trp53.3_NTC.34
  crRNA array
  misc_feature (148)..(157): n is a, c, g, or t
cttggctttatatatcttgtggaaaggacgaaacaccgtaatttctactaagtgtagatccctcccacgtgctcacccttaatttctactaagtgtagattagcgttcgacacgtgaaactaatttctactaagtgtagatttttttnnnnnnnnnnaagcttggcgtggatccgatatcaactagatcttgagacaaatggcagtattcatccacaattttaaaagaaaaggggggattggggggtacagtgcaggggaaagaatagtagacataatagcaacagacatacaaactaaag

SEQ ID NO: 19671 - DNA, 301 bp, Artificial Sequence
  Trp53.3_NTC.35
  crRNA array
  misc_feature (148)..(157): n is a, c, g, or t
cttggctttatatatcttgtggaaaggacgaaacaccgtaatttctactaagtgtagatccctcccacgtgctcacccttaatttctactaagtgtagattggcgcgtaatcgctattcgtaatttctactaagtgtagatttttttnnnnnnnnnnaagcttggcgtggatccgatatcaactagatcttgagacaaatggcagtattcatccacaattttaaaagaaaaggggggattggggggtacagtgcaggggaaagaatagtagacataatagcaacagacatacaaactaaag

SEQ ID NO: 19672 - DNA, 301 bp, Artificial Sequence
  Trp53.3_NTC.36
  crRNA array
  misc_feature (148)..(157): n is a, c, g, or t
cttggctttatatatcttgtggaaaggacgaaacaccgtaatttctactaagtgtagatccctcccacgtgctcacccttaatttctactaagtgtagatcaacccgccgtagcgggccttaatttctactaagtgtagatttttttnnnnnnnnnnaagcttggcgtggatccgatatcaactagatcttgagacaaatggcagtattcatccacaattttaaaagaaaaggggggattggggggtacagtgcaggggaaagaatagtagacataatagcaacagacatacaaactaaag

SEQ ID NO: 19673 - DNA, 301 bp, Artificial Sequence
  Trp53.3_NTC.37
  crRNA array
  misc_feature (148)..(157): n is a, c, g, or t
cttggctttatatatcttgtggaaaggacgaaacaccgtaatttctactaagtgtagatccctcccacgtgctcacccttaatttctactaagtgtagattttgcgttgacgcgattacttaatttctactaagtgtagatttttttnnnnnnnnnnaagcttggcgtggatccgatatcaactagatcttgagacaaatggcagtattcatccacaattttaaaagaaaaggggggattggggggtacagtgcaggggaaagaatagtagacataatagcaacagacatacaaactaaag

SEQ ID NO: 19674 - DNA, 301 bp, Artificial Sequence
  Trp53.3_NTC.38
  crRNA array
  misc_feature (148)..(157): n is a, c, g, or t
cttggctttatatatcttgtggaaaggacgaaacaccgtaatttctactaagtgtagatccctcccacgtgctcacccttaatttctactaagtgtagataacggagcgcgatactaccataatttctactaagtgtagatttttttnnnnnnnnnnaagcttggcgtggatccgatatcaactagatcttgagacaaatggcagtattcatccacaattttaaaagaaaaggggggattggggggtacagtgcaggggaaagaatagtagacataatagcaacagacatacaaactaaag

SEQ ID NO: 19675 - DNA, 301 bp, Artificial Sequence
  Trp53.3_NTC.39
  crRNA array
  misc_feature (148)..(157): n is a, c, g, or t
cttggctttatatatcttgtggaaaggacgaaacaccgtaatttctactaagtgtagatccctcccacgtgctcacccttaatttctactaagtgtagatccggacgttataacgtttcttaatttctactaagtgtagatttttttnnnnnnnnnnaagcttggcgtggatccgatatcaactagatcttgagacaaatggcagtattcatccacaattttaaaagaaaaggggggattggggggtacagtgcaggggaaagaatagtagacataatagcaacagacatacaaactaaag

SEQ ID NO: 19676 - DNA, 301 bp, Artificial Sequence
  Trp53.3_NTC.4
  crRNA array
  misc_feature (148)..(157): n is a, c, g, or t
cttggctttatatatcttgtggaaaggacgaaacaccgtaatttctactaagtgtagatccctcccacgtgctcacccttaatttctactaagtgtagatatacccgtcgcgaacgtgagtaatttctactaagtgtagatttttttnnnnnnnnnnaagcttggcgtggatccgatatcaactagatcttgagacaaatggcagtattcatccacaattttaaaagaaaaggggggattggggggtacagtgcaggggaaagaatagtagacataatagcaacagacatacaaactaaag

SEQ ID NO: 19677 - DNA, 301 bp, Artificial Sequence
  Trp53.3_NTC.40
  crRNA array
  misc_feature (148)..(157): n is a, c, g, or t
cttggctttatatatcttgtggaaaggacgaaacaccgtaatttctactaagtgtagatccctcccacgtgctcacccttaatttctactaagtgtagatattcgcgaacccggccggaataatttctactaagtgtagatttttttnnnnnnnnnnaagcttggcgtggatccgatatcaactagatcttgagacaaatggcagtattcatccacaattttaaaagaaaaggggggattggggggtacagtgcaggggaaagaatagtagacataatagcaacagacatacaaactaaag

SEQ ID NO: 19678 - DNA, 301 bp, Artificial Sequence
  Trp53.3_NTC.41
  crRNA array
  misc_feature (148)..(157): n is a, c, g, or t
cttggctttatatatcttgtggaaaggacgaaacaccgtaatttctactaagtgtagatccctcccacgtgctcacccttaatttctactaagtgtagatttgatggcgcgacgcgttattaatttctactaagtgtagatttttttnnnnnnnnnnaagcttggcgtggatccgatatcaactagatcttgagacaaatggcagtattcatccacaattttaaaagaaaaggggggattggggggtacagtgcaggggaaagaatagtagacataatagcaacagacatacaaactaaag

SEQ ID NO: 19679 - DNA, 301 bp, Artificial Sequence
  Trp53.3_NTC.42
  crRNA array
  misc_feature (148)..(157): n is a, c, g, or t
cttggctttatatatcttgtggaaaggacgaaacaccgtaatttctactaagtgtagatccctcccacgtgctcacccttaatttctactaagtgtagatggtcaaatcgcggcgataactaatttctactaagtgtagatttttttnnnnnnnnnnaagcttggcgtggatccgatatcaactagatcttgagacaaatggcagtattcatccacaattttaaaagaaaaggggggattggggggtacagtgcaggggaaagaatagtagacataatagcaacagacatacaaactaaag

SEQ ID NO: 19680 - DNA, 301 bp, Artificial Sequence
  Trp53.3_NTC.43
  crRNA array
  misc_feature (148)..(157): n is a, c, g, or t
cttggctttatatatcttgtggaaaggacgaaacaccgtaatttctactaagtgtagatccctcccacgtgctcacccttaatttctactaagtgtagatcgactcgcgcattgaactggtaatttctactaagtgtagatttttttnnnnnnnnnnaagcttggcgtggatccgatatcaactagatcttgagacaaatggcagtattcatccacaattttaaaagaaaaggggggattggggggtacagtgcaggggaaagaatagtagacataatagcaacagacatacaaactaaag

SEQ ID NO: 19681 - DNA, 301 bp, Artificial Sequence
  Trp53.3_NTC.44
  crRNA array
  misc_feature (148)..(157): n is a, c, g, or t
cttggctttatatatcttgtggaaaggacgaaacaccgtaatttctactaagtgtagatccctcccacgtgctcacccttaatttctactaagtgtagatagcgtcgtacgatttatcgttaatttctactaagtgtagatttttttnnnnnnnnnnaagcttggcgtggatccgatatcaactagatcttgagacaaatggcagtattcatccacaattttaaaagaaaaggggggattggggggtacagtgcaggggaaagaatagtagacataatagcaacagacatacaaactaaag

SEQ ID NO: 19682 - DNA, 301 bp, Artificial Sequence
  Trp53.3_NTC.45
  crRNA array
  misc_feature (148)..(157): n is a, c, g, or t
cttggctttatatatcttgtggaaaggacgaaacaccgtaatttctactaagtgtagatccctcccacgtgctcacccttaatttctactaagtgtagatcggaacgcgtgatactagggtaatttctactaagtgtagatttttttnnnnnnnnnnaagcttggcgtggatccgatatcaactagatcttgagacaaatggcagtattcatccacaattttaaaagaaaaggggggattggggggtacagtgcaggggaaagaatagtagacataatagcaacagacatacaaactaaag

SEQ ID NO: 19683 - DNA, 301 bp, Artificial Sequence
  Trp53.3_NTC.46
  crRNA array
  misc_feature (148)..(157): n is a, c, g, or t
cttggctttatatatcttgtggaaaggacgaaacaccgtaatttctactaagtgtagatccctcccacgtgctcacccttaatttctactaagtgtagatagcgggtcgtagacgcgcggtaatttctactaagtgtagatttttttnnnnnnnnnnaagcttggcgtggatccgatatcaactagatcttgagacaaatggcagtattcatccacaattttaaaagaaaaggggggattggggggtacagtgcaggggaaagaatagtagacataatagcaacagacatacaaactaaag

SEQ ID NO: 19684 - DNA, 301 bp, Artificial Sequence
  Trp53.3_NTC.47
  crRNA array
  misc_feature (148)..(157): n is a, c, g, or t
cttggctttatatatcttgtggaaaggacgaaacaccgtaatttctactaagtgtagatccctcccacgtgctcacccttaatttctactaagtgtagattctcgtatcgcgattgttaataatttctactaagtgtagatttttttnnnnnnnnnnaagcttggcgtggatccgatatcaactagatcttgagacaaatggcagtattcatccacaattttaaaagaaaaggggggattggggggtacagtgcaggggaaagaatagtagacataatagcaacagacatacaaactaaag

SEQ ID NO: 19685 - DNA, 301 bp, Artificial Sequence
  Trp53.3_NTC.48
  crRNA array
  misc_feature (148)..(157): n is a, c, g, or t
cttggctttatatatcttgtggaaaggacgaaacaccgtaatttctactaagtgtagatccctcccacgtgctcacccttaatttctactaagtgtagatcggtcgactacggctgttagtaatttctactaagtgtagatttttttnnnnnnnnnnaagcttggcgtggatccgatatcaactagatcttgagacaaatggcagtattcatccacaattttaaaagaaaaggggggattggggggtacagtgcaggggaaagaatagtagacataatagcaacagacatacaaactaaag

SEQ ID NO: 19686 - DNA, 301 bp, Artificial Sequence
  Trp53.3_NTC.49
  crRNA array
  misc_feature (148)..(157): n is a, c, g, or t
cttggctttatatatcttgtggaaaggacgaaacaccgtaatttctactaagtgtagatccctcccacgtgctcacccttaatttctactaagtgtagattcggggcgcgtcaactgaattaatttctactaagtgtagatttttttnnnnnnnnnnaagcttggcgtggatccgatatcaactagatcttgagacaaatggcagtattcatccacaattttaaaagaaaaggggggattggggggtacagtgcaggggaaagaatagtagacataatagcaacagacatacaaactaaag

SEQ ID NO: 19687 - DNA, 301 bp, Artificial Sequence
  Trp53.3_NTC.5
  crRNA array
  misc_feature (148)..(157): n is a, c, g, or t
cttggctttatatatcttgtggaaaggacgaaacaccgtaatttctactaagtgtagatccctcccacgtgctcacccttaatttctactaagtgtagatgcttacgcgtcgcgaatgtataatttctactaagtgtagatttttttnnnnnnnnnnaagcttggcgtggatccgatatcaactagatcttgagacaaatggcagtattcatccacaattttaaaagaaaaggggggattggggggtacagtgcaggggaaagaatagtagacataatagcaacagacatacaaactaaag

SEQ ID NO: 19688 - DNA, 301 bp, Artificial Sequence
  Trp53.3_NTC.50
  crRNA array
  misc_feature (148)..(157): n is a, c, g, or t
cttggctttatatatcttgtggaaaggacgaaacaccgtaatttctactaagtgtagatccctcccacgtgctcacccttaatttctactaagtgtagatattgccgctcgcgcaaaatctaatttctactaagtgtagatttttttnnnnnnnnnnaagcttggcgtggatccgatatcaactagatcttgagacaaatggcagtattcatccacaattttaaaagaaaaggggggattggggggtacagtgcaggggaaagaatagtagacataatagcaacagacatacaaactaaag

SEQ ID NO: 19689 - DNA, 301 bp, Artificial Sequence
  Trp53.3_NTC.51
  crRNA array
  misc_feature (148)..(157): n is a, c, g, or t
cttggctttatatatcttgtggaaaggacgaaacaccgtaatttctactaagtgtagatccctcccacgtgctcacccttaatttctactaagtgtagattaacgcgcaacacgccaatgtaatttctactaagtgtagatttttttnnnnnnnnnnaagcttggcgtggatccgatatcaactagatcttgagacaaatggcagtattcatccacaattttaaaagaaaaggggggattggggggtacagtgcaggggaaagaatagtagacataatagcaacagacatacaaactaaag

SEQ ID NO: 19690 - DNA, 301 bp, Artificial Sequence
  Trp53.3_NTC.6
  crRNA array
  misc_feature (148)..(157): n is a, c, g, or t
cttggctttatatatcttgtggaaaggacgaaacaccgtaatttctactaagtgtagatccctcccacgtgctcacccttaatttctactaagtgtagatcgaatcgcgcctacgggaattaatttctactaagtgtagatttttttnnnnnnnnnnaagcttggcgtggatccgatatcaactagatcttgagacaaatggcagtattcatccacaattttaaaagaaaaggggggattggggggtacagtgcaggggaaagaatagtagacataatagcaacagacatacaaactaaag

SEQ ID NO: 19691 - DNA, 301 bp, Artificial Sequence
  Trp53.3_NTC.7
  crRNA array
  misc_feature (148)..(157): n is a, c, g, or t
cttggctttatatatcttgtggaaaggacgaaacaccgtaatttctactaagtgtagatccctcccacgtgctcacccttaatttctactaagtgtagatcgccgaacggataagactattaatttctactaagtgtagatttttttnnnnnnnnnnaagcttggcgtggatccgatatcaactagatcttgagacaaatggcagtattcatccacaattttaaaagaaaaggggggattggggggtacagtgcaggggaaagaatagtagacataatagcaacagacatacaaactaaag

SEQ ID NO: 19692 - DNA, 301 bp, Artificial Sequence
  Trp53.3_NTC.8
  crRNA array
  misc_feature (148)..(157): n is a, c, g, or t
cttggctttatatatcttgtggaaaggacgaaacaccgtaatttctactaagtgtagatccctcccacgtgctcacccttaatttctactaagtgtagatcgaccgaggttacgctgggataatttctactaagtgtagatttttttnnnnnnnnnnaagcttggcgtggatccgatatcaactagatcttgagacaaatggcagtattcatccacaattttaaaagaaaaggggggattggggggtacagtgcaggggaaagaatagtagacataatagcaacagacatacaaactaaag

SEQ ID NO: 19693 - DNA, 301 bp, Artificial Sequence
  Trp53.3_NTC.9
  crRNA array
  misc_feature (148)..(157): n is a, c, g, or t
cttggctttatatatcttgtggaaaggacgaaacaccgtaatttctactaagtgtagatccctcccacgtgctcacccttaatttctactaagtgtagatatcgccgtacggctatggcataatttctactaagtgtagatttttttnnnnnnnnnnaagcttggcgtggatccgatatcaactagatcttgagacaaatggcagtattcatccacaattttaaaagaaaaggggggattggggggtacagtgcaggggaaagaatagtagacataatagcaacagacatacaaactaaag

SEQ ID NO: 19694 - DNA, 301 bp, Artificial Sequence
  Trp53.4_NTC.0
  crRNA array
  misc_feature (148)..(157): n is a, c, g, or t
cttggctttatatatcttgtggaaaggacgaaacaccgtaatttctactaagtgtagattccaccccccaccctgtctctaatttctactaagtgtagattatagcgtcgcgcgctaatttaatttctactaagtgtagatttttttnnnnnnnnnnaagcttggcgtggatccgatatcaactagatcttgagacaaatggcagtattcatccacaattttaaaagaaaaggggggattggggggtacagtgcaggggaaagaatagtagacataatagcaacagacatacaaactaaag

SEQ ID NO: 19695 - DNA, 301 bp, Artificial Sequence
  Trp53.4_NTC.1
  crRNA array
  misc_feature (148)..(157): n is a, c, g, or t
cttggctttatatatcttgtggaaaggacgaaacaccgtaatttctactaagtgtagattccaccccccaccctgtctctaatttctactaagtgtagatcgcgtaaccgttccggctcctaatttctactaagtgtagatttttttnnnnnnnnnnaagcttggcgtggatccgatatcaactagatcttgagacaaatggcagtattcatccacaattttaaaagaaaaggggggattggggggtacagtgcaggggaaagaatagtagacataatagcaacagacatacaaactaaag

SEQ ID NO: 19696 - DNA, 301 bp, Artificial Sequence
  Trp53.4_NTC.10
  crRNA array
  misc_feature (148)..(157): n is a, c, g, or t
cttggctttatatatcttgtggaaaggacgaaacaccgtaatttctactaagtgtagattccaccccccaccctgtctctaatttctactaagtgtagatcgctaagttcgcgcgggccgtaatttctactaagtgtagatttttttnnnnnnnnnnaagcttggcgtggatccgatatcaactagatcttgagacaaatggcagtattcatccacaattttaaaagaaaaggggggattggggggtacagtgcaggggaaagaatagtagacataatagcaacagacatacaaactaaag

SEQ ID NO: 19697 - DNA, 301 bp, Artificial Sequence
  Trp53.4_NTC.11
  crRNA array
  misc_feature (148)..(157): n is a, c, g, or t
cttggctttatatatcttgtggaaaggacgaaacaccgtaatttctactaagtgtagattccaccccccaccctgtctctaatttctactaagtgtagatcgttcgtcgacgaagcaatctaatttctactaagtgtagatttttttnnnnnnnnnnaagcttggcgtggatccgatatcaactagatcttgagacaaatggcagtattcatccacaattttaaaagaaaaggggggattggggggtacagtgcaggggaaagaatagtagacataatagcaacagacatacaaactaaag

SEQ ID NO: 19698 - DNA, 301 bp, Artificial Sequence
  Trp53.4_NTC.12
  crRNA array
  misc_feature (148)..(157): n is a, c, g, or t
cttggctttatatatcttgtggaaaggacgaaacaccgtaatttctactaagtgtagattccaccccccaccctgtctctaatttctactaagtgtagatcgccgacgattaatcaatagtaatttctactaagtgtagatttttttnnnnnnnnnnaagcttggcgtggatccgatatcaactagatcttgagacaaatggcagtattcatccacaattttaaaagaaaaggggggattggggggtacagtgcaggggaaagaatagtagacataatagcaacagacatacaaactaaag

SEQ ID NO: 19699 - DNA, 301 bp, Artificial Sequence
  Trp53.4_NTC.13
  crRNA array
  misc_feature (148)..(157): n is a, c, g, or t
cttggctttatatatcttgtggaaaggacgaaacaccgtaatttctactaagtgtagattccaccccccaccctgtctctaatttctactaagtgtagatgaccgttgtatcgcgatcaataatttctactaagtgtagatttttttnnnnnnnnnnaagcttggcgtggatccgatatcaactagatcttgagacaaatggcagtattcatccacaattttaaaagaaaaggggggattggggggtacagtgcaggggaaagaatagtagacataatagcaacagacatacaaactaaag

SEQ ID NO: 19700 - DNA, 301 bp, Artificial Sequence
  Trp53.4_NTC.14
  crRNA array
  misc_feature (148)..(157): n is a, c, g, or t
cttggctttatatatcttgtggaaaggacgaaacaccgtaatttctactaagtgtagattccaccccccaccctgtctctaatttctactaagtgtagatccgttcgtgcgatagtgttttaatttctactaagtgtagatttttttnnnnnnnnnnaagcttggcgtggatccgatatcaactagatcttgagacaaatggcagtattcatccacaattttaaaagaaaaggggggattggggggtacagtgcaggggaaagaatagtagacataatagcaacagacatacaaactaaag

SEQ ID NO: 19701 - DNA, 301 bp, Artificial Sequence
  Trp53.4_NTC.15
  crRNA array
  misc_feature (148)..(157): n is a, c, g, or t
cttggctttatatatcttgtggaaaggacgaaacaccgtaatttctactaagtgtagattccaccccccaccctgtctctaatttctactaagtgtagatgttgtcgtgccgcgaatttataatttctactaagtgtagatttttttnnnnnnnnnnaagcttggcgtggatccgatatcaactagatcttgagacaaatggcagtattcatccacaattttaaaagaaaaggggggattggggggtacagtgcaggggaaagaatagtagacataatagcaacagacatacaaactaaag

SEQ ID NO: 19702 - DNA, 301 bp, Artificial Sequence
  Trp53.4_NTC.16
  crRNA array
  misc_feature (148)..(157): n is a, c, g, or t
cttggctttatatatcttgtggaaaggacgaaacaccgtaatttctactaagtgtagattccaccccccaccctgtctctaatttctactaagtgtagatcggtacgttagacgaaaatttaatttctactaagtgtagatttttttnnnnnnnnnnaagcttggcgtggatccgatatcaactagatcttgagacaaatggcagtattcatccacaattttaaaagaaaaggggggattggggggtacagtgcaggggaaagaatagtagacataatagcaacagacatacaaactaaag

SEQ ID NO: 19703 - DNA, 301 bp, Artificial Sequence
  Trp53.4_NTC.17
  crRNA array
  misc_feature (148)..(157): n is a, c, g, or t
cttggctttatatatcttgtggaaaggacgaaacaccgtaatttctactaagtgtagattccaccccccaccctgtctctaatttctactaagtgtagattatcgaacgctatcgaacgttaatttctactaagtgtagatttttttnnnnnnnnnnaagcttggcgtggatccgatatcaactagatcttgagacaaatggcagtattcatccacaattttaaaagaaaaggggggattggggggtacagtgcaggggaaagaatagtagacataatagcaacagacatacaaactaaag

SEQ ID NO: 19704 - DNA, 301 bp, Artificial Sequence
  Trp53.4_NTC.18
  crRNA array
  misc_feature (148)..(157): n is a, c, g, or t
cttggctttatatatcttgtggaaaggacgaaacaccgtaatttctactaagtgtagattccaccccccaccctgtctctaatttctactaagtgtagattccggttacgaccggcaaaataatttctactaagtgtagatttttttnnnnnnnnnnaagcttggcgtggatccgatatcaactagatcttgagacaaatggcagtattcatccacaattttaaaagaaaaggggggattggggggtacagtgcaggggaaagaatagtagacataatagcaacagacatacaaactaaag

SEQ ID NO: 19705 - DNA, 301 bp, Artificial Sequence
  Trp53.4_NTC.19
  crRNA array
  misc_feature (148)..(157): n is a, c, g, or t
cttggctttatatatcttgtggaaaggacgaaacaccgtaatttctactaagtgtagattccaccccccaccctgtctctaatttctactaagtgtagatcgtcgtagaacgatacccgataatttctactaagtgtagatttttttnnnnnnnnnnaagcttggcgtggatccgatatcaactagatcttgagacaaatggcagtattcatccacaattttaaaagaaaaggggggattggggggtacagtgcaggggaaagaatagtagacataatagcaacagacatacaaactaaag

SEQ ID NO: 19706 - DNA, 301 bp, Artificial Sequence
  Trp53.4_NTC.2
  crRNA array
  misc_feature (148)..(157): n is a, c, g, or t
cttggctttatatatcttgtggaaaggacgaaacaccgtaatttctactaagtgtagattccaccccccaccctgtctctaatttctactaagtgtagatttatgtcgcgccgcgacccgtaatttctactaagtgtagatttttttnnnnnnnnnnaagcttggcgtggatccgatatcaactagatcttgagacaaatggcagtattcatccacaattttaaaagaaaaggggggattggggggtacagtgcaggggaaagaatagtagacataatagcaacagacatacaaactaaag

SEQ ID NO: 19707 - DNA, 301 bp, Artificial Sequence
  Trp53.4_NTC.20
  crRNA array
  misc_feature (148)..(157): n is a, c, g, or t
cttggctttatatatcttgtggaaaggacgaaacaccgtaatttctactaagtgtagattccaccccccaccctgtctctaatttctactaagtgtagatattccggcgcgaccagaagataatttctactaagtgtagatttttttnnnnnnnnnnaagcttggcgtggatccgatatcaactagatcttgagacaaatggcagtattcatccacaattttaaaagaaaaggggggattggggggtacagtgcaggggaaagaatagtagacataatagcaacagacatacaaactaaag

SEQ ID NO: 19708 - DNA, 301 bp, Artificial Sequence
  Trp53.4_NTC.21
  crRNA array
  misc_feature (148)..(157): n is a, c, g, or t
cttggctttatatatcttgtggaaaggacgaaacaccgtaatttctactaagtgtagattccaccccccaccctgtctctaatttctactaagtgtagatgtataacttcgcgcggtccgtaatttctactaagtgtagatttttttnnnnnnnnnnaagcttggcgtggatccgatatcaactagatcttgagacaaatggcagtattcatccacaattttaaaagaaaaggggggattggggggtacagtgcaggggaaagaatagtagacataatagcaacagacatacaaactaaag

SEQ ID NO: 19709 - DNA, 301 bp, Artificial Sequence
  Trp53.4_NTC.22
  crRNA array
  misc_feature (148)..(157): n is a, c, g, or t
cttggctttatatatcttgtggaaaggacgaaacaccgtaatttctactaagtgtagattccaccccccaccctgtctctaatttctactaagtgtagatgcgcgtcaacgtaatgtgcctaatttctactaagtgtagatttttttnnnnnnnnnnaagcttggcgtggatccgatatcaactagatcttgagacaaatggcagtattcatccacaattttaaaagaaaaggggggattggggggtacagtgcaggggaaagaatagtagacataatagcaacagacatacaaactaaag

SEQ ID NO: 19710 - DNA, 301 bp, Artificial Sequence
  Trp53.4_NTC.23
  crRNA array
  misc_feature (148)..(157): n is a, c, g, or t
cttggctttatatatcttgtggaaaggacgaaacaccgtaatttctactaagtgtagattccaccccccaccctgtctctaatttctactaagtgtagatacgcgctattatcgtaggtgtaatttctactaagtgtagatttttttnnnnnnnnnnaagcttggcgtggatccgatatcaactagatcttgagacaaatggcagtattcatccacaattttaaaagaaaaggggggattggggggtacagtgcaggggaaagaatagtagacataatagcaacagacatacaaactaaag

SEQ ID NO: 19711 - DNA, 301 bp, Artificial Sequence
  Trp53.4_NTC.24
  crRNA array
  misc_feature (148)..(157): n is a, c, g, or t
cttggctttatatatcttgtggaaaggacgaaacaccgtaatttctactaagtgtagattccaccccccaccctgtctctaatttctactaagtgtagatactatcgacgttcgtcccggtaatttctactaagtgtagatttttttnnnnnnnnnnaagcttggcgtggatccgatatcaactagatcttgagacaaatggcagtattcatccacaattttaaaagaaaaggggggattggggggtacagtgcaggggaaagaatagtagacataatagcaacagacatacaaactaaag

SEQ ID NO: 19712 - DNA, 301 bp, Artificial Sequence
  Trp53.4_NTC.25
  crRNA array
  misc_feature (148)..(157): n is a, c, g, or t
cttggctttatatatcttgtggaaaggacgaaacaccgtaatttctactaagtgtagattccaccccccaccctgtctctaatttctactaagtgtagattcgcgttatcgtgccgtgcgtaatttctactaagtgtagatttttttnnnnnnnnnnaagcttggcgtggatccgatatcaactagatcttgagacaaatggcagtattcatccacaattttaaaagaaaaggggggattggggggtacagtgcaggggaaagaatagtagacataatagcaacagacatacaaactaaag

SEQ ID NO: 19713 - DNA, 301 bp, Artificial Sequence
  Trp53.4_NTC.26
  crRNA array
  misc_feature (148)..(157): n is a, c, g, or t
cttggctttatatatcttgtggaaaggacgaaacaccgtaatttctactaagtgtagattccaccccccaccctgtctctaatttctactaagtgtagatcgcgacggcggttttaacactaatttctactaagtgtagatttttttnnnnnnnnnnaagcttggcgtggatccgatatcaactagatcttgagacaaatggcagtattcatccacaattttaaaagaaaaggggggattggggggtacagtgcaggggaaagaatagtagacataatagcaacagacatacaaactaaag

SEQ ID NO: 19714 - DNA, 301 bp, Artificial Sequence
  Trp53.4_NTC.27
  crRNA array
  misc_feature (148)..(157): n is a, c, g, or t
cttggctttatatatcttgtggaaaggacgaaacaccgtaatttctactaagtgtagattccaccccccaccctgtctctaatttctactaagtgtagatgtcgcgttgcgaccggcgcttaatttctactaagtgtagatttttttnnnnnnnnnnaagcttggcgtggatccgatatcaactagatcttgagacaaatggcagtattcatccacaattttaaaagaaaaggggggattggggggtacagtgcaggggaaagaatagtagacataatagcaacagacatacaaactaaag

SEQ ID NO: 19715 - DNA, 301 bp, Artificial Sequence
  Trp53.4_NTC.28
  crRNA array
  misc_feature (148)..(157): n is a, c, g, or t
cttggctttatatatcttgtggaaaggacgaaacaccgtaatttctactaagtgtagattccaccccccaccctgtctctaatttctactaagtgtagataccgctaatcggcgtaaacttaatttctactaagtgtagatttttttnnnnnnnnnnaagcttggcgtggatccgatatcaactagatcttgagacaaatggcagtattcatccacaattttaaaagaaaaggggggattggggggtacagtgcaggggaaagaatagtagacataatagcaacagacatacaaactaaag

SEQ ID NO: 19716 - DNA, 301 bp, Artificial Sequence
  Trp53.4_NTC.29
  crRNA array
  misc_feature (148)..(157): n is a, c, g, or t
cttggctttatatatcttgtggaaaggacgaaacaccgtaatttctactaagtgtagattccaccccccaccctgtctctaatttctactaagtgtagatcgcgatctataccgtctatataatttctactaagtgtagatttttttnnnnnnnnnnaagcttggcgtggatccgatatcaactagatcttgagacaaatggcagtattcatccacaattttaaaagaaaaggggggattggggggtacagtgcaggggaaagaatagtagacataatagcaacagacatacaaactaaag

SEQ ID NO: 19717 - DNA, 301 bp, Artificial Sequence
  Trp53.4_NTC.3
  crRNA array
  misc_feature (148)..(157): n is a, c, g, or t
cttggctttatatatcttgtggaaaggacgaaacaccgtaatttctactaagtgtagattccaccccccaccctgtctctaatttctactaagtgtagattcgacgcgagacgacgtacataatttctactaagtgtagatttttttnnnnnnnnnnaagcttggcgtggatccgatatcaactagatcttgagacaaatggcagtattcatccacaattttaaaagaaaaggggggattggggggtacagtgcaggggaaagaatagtagacataatagcaacagacatacaaactaaag

SEQ ID NO: 19718 - DNA, 301 bp, Artificial Sequence
  Trp53.4_NTC.30
  crRNA array
  misc_feature (148)..(157): n is a, c, g, or t
cttggctttatatatcttgtggaaaggacgaaacaccgtaatttctactaagtgtagattccaccccccaccctgtctctaatttctactaagtgtagatcgatcgtacgggtgtcctaataatttctactaagtgtagatttttttnnnnnnnnnnaagcttggcgtggatccgatatcaactagatcttgagacaaatggcagtattcatccacaattttaaaagaaaaggggggattggggggtacagtgcaggggaaagaatagtagacataatagcaacagacatacaaactaaag

SEQ ID NO: 19719 - DNA, 301 bp, Artificial Sequence
  Trp53.4_NTC.31
  crRNA array
  misc_feature (148)..(157): n is a, c, g, or t
cttggctttatatatcttgtggaaaggacgaaacaccgtaatttctactaagtgtagattccaccccccaccctgtctctaatttctactaagtgtagatgccgaccgcgtgattgtaggtaatttctactaagtgtagatttttttnnnnnnnnnnaagcttggcgtggatccgatatcaactagatcttgagacaaatggcagtattcatccacaattttaaaagaaaaggggggattggggggtacagtgcaggggaaagaatagtagacataatagcaacagacatacaaactaaag

SEQ ID NO: 19720 - DNA, 301 bp, Artificial Sequence
  Trp53.4_NTC.32
  crRNA array
  misc_feature (148)..(157): n is a, c, g, or t
cttggctttatatatcttgtggaaaggacgaaacaccgtaatttctactaagtgtagattccaccccccaccctgtctctaatttctactaagtgtagatgcacgttacgcccgggtcactaatttctactaagtgtagatttttttnnnnnnnnnnaagcttggcgtggatccgatatcaactagatcttgagacaaatggcagtattcatccacaattttaaaagaaaaggggggattggggggtacagtgcaggggaaagaatagtagacataatagcaacagacatacaaactaaag

SEQ ID NO: 19721 - DNA, 301 bp, Artificial Sequence
  Trp53.4_NTC.33
  crRNA array
  misc_feature (148)..(157): n is a, c, g, or t
cttggctttatatatcttgtggaaaggacgaaacaccgtaatttctactaagtgtagattccaccccccaccctgtctctaatttctactaagtgtagattaagcgaccgacgcattcgctaatttctactaagtgtagatttttttnnnnnnnnnnaagcttggcgtggatccgatatcaactagatcttgagacaaatggcagtattcatccacaattttaaaagaaaaggggggattggggggtacagtgcaggggaaagaatagtagacataatagcaacagacatacaaactaaag

SEQ ID NO: 19722 - DNA, 301 bp, Artificial Sequence
  Trp53.4_NTC.34
  crRNA array
  misc_feature (148)..(157): n is a, c, g, or t
cttggctttatatatcttgtggaaaggacgaaacaccgtaatttctactaagtgtagattccaccccccaccctgtctctaatttctactaagtgtagattagcgttcgacacgtgaaactaatttctactaagtgtagatttttttnnnnnnnnnnaagcttggcgtggatccgatatcaactagatcttgagacaaatggcagtattcatccacaattttaaaagaaaaggggggattggggggtacagtgcaggggaaagaatagtagacataatagcaacagacatacaaactaaag

SEQ ID NO: 19723 - DNA, 301 bp, Artificial Sequence
  Trp53.4_NTC.35
  crRNA array
  misc_feature (148)..(157): n is a, c, g, or t
cttggctttatatatcttgtggaaaggacgaaacaccgtaatttctactaagtgtagattccaccccccaccctgtctctaatttctactaagtgtagattggcgcgtaatcgctattcgtaatttctactaagtgtagatttttttnnnnnnnnnnaagcttggcgtggatccgatatcaactagatcttgagacaaatggcagtattcatccacaattttaaaagaaaaggggggattggggggtacagtgcaggggaaagaatagtagacataatagcaacagacatacaaactaaag

SEQ ID NO: 19724 - DNA, 301 bp, Artificial Sequence
  Trp53.4_NTC.36
  crRNA array
  misc_feature (148)..(157): n is a, c, g, or t
cttggctttatatatcttgtggaaaggacgaaacaccgtaatttctactaagtgtagattccaccccccaccctgtctctaatttctactaagtgtagatcaacccgccgtagcgggccttaatttctactaagtgtagatttttttnnnnnnnnnnaagcttggcgtggatccgatatcaactagatcttgagacaaatggcagtattcatccacaattttaaaagaaaaggggggattggggggtacagtgcaggggaaagaatagtagacataatagcaacagacatacaaactaaag

SEQ ID NO: 19725 - DNA, 301 bp, Artificial Sequence
  Trp53.4_NTC.37
  crRNA array
  misc_feature (148)..(157): n is a, c, g, or t
cttggctttatatatcttgtggaaaggacgaaacaccgtaatttctactaagtgtagattccaccccccaccctgtctctaatttctactaagtgtagattttgcgttgacgcgattacttaatttctactaagtgtagatttttttnnnnnnnnnnaagcttggcgtggatccgatatcaactagatcttgagacaaatggcagtattcatccacaattttaaaagaaaaggggggattggggggtacagtgcaggggaaagaatagtagacataatagcaacagacatacaaactaaag

SEQ ID NO: 19726 - DNA, 301 bp, Artificial Sequence
  Trp53.4_NTC.38
  crRNA array
  misc_feature (148)..(157): n is a, c, g, or t
cttggctttatatatcttgtggaaaggacgaaacaccgtaatttctactaagtgtagattccaccccccaccctgtctctaatttctactaagtgtagataacggagcgcgatactaccataatttctactaagtgtagatttttttnnnnnnnnnnaagcttggcgtggatccgatatcaactagatcttgagacaaatggcagtattcatccacaattttaaaagaaaaggggggattggggggtacagtgcaggggaaagaatagtagacataatagcaacagacatacaaactaaag

SEQ ID NO: 19727 - DNA, 301 bp, Artificial Sequence
  Trp53.4_NTC.39
  crRNA array
  misc_feature (148)..(157): n is a, c, g, or t
cttggctttatatatcttgtggaaaggacgaaacaccgtaatttctactaagtgtagattccaccccccaccctgtctctaatttctactaagtgtagatccggacgttataacgtttcttaatttctactaagtgtagatttttttnnnnnnnnnnaagcttggcgtggatccgatatcaactagatcttgagacaaatggcagtattcatccacaattttaaaagaaaaggggggattggggggtacagtgcaggggaaagaatagtagacataatagcaacagacatacaaactaaag

SEQ ID NO: 19728 - DNA, 301 bp, Artificial Sequence
  Trp53.4_NTC.4
  crRNA array
  misc_feature (148)..(157): n is a, c, g, or t
cttggctttatatatcttgtggaaaggacgaaacaccgtaatttctactaagtgtagattccaccccccaccctgtctctaatttctactaagtgtagatatacccgtcgcgaacgtgagtaatttctactaagtgtagatttttttnnnnnnnnnnaagcttggcgtggatccgatatcaactagatcttgagacaaatggcagtattcatccacaattttaaaagaaaaggggggattggggggtacagtgcaggggaaagaatagtagacataatagcaacagacatacaaactaaag

SEQ ID NO: 19729 - DNA, 301 bp, Artificial Sequence
  Trp53.4_NTC.40
  crRNA array
  misc_feature (148)..(157): n is a, c, g, or t
cttggctttatatatcttgtggaaaggacgaaacaccgtaatttctactaagtgtagattccaccccccaccctgtctctaatttctactaagtgtagatattcgcgaacccggccggaataatttctactaagtgtagatttttttnnnnnnnnnnaagcttggcgtggatccgatatcaactagatcttgagacaaatggcagtattcatccacaattttaaaagaaaaggggggattggggggtacagtgcaggggaaagaatagtagacataatagcaacagacatacaaactaaag

SEQ ID NO: 19730 - DNA, 301 bp, Artificial Sequence
  Trp53.4_NTC.41
  crRNA array
  misc_feature (148)..(157): n is a, c, g, or t
cttggctttatatatcttgtggaaaggacgaaacaccgtaatttctactaagtgtagattccaccccccaccctgtctctaatttctactaagtgtagatttgatggcgcgacgcgttattaatttctactaagtgtagatttttttnnnnnnnnnnaagcttggcgtggatccgatatcaactagatcttgagacaaatggcagtattcatccacaattttaaaagaaaaggggggattggggggtacagtgcaggggaaagaatagtagacataatagcaacagacatacaaactaaag

SEQ ID NO: 19731 - DNA, 301 bp, Artificial Sequence
  Trp53.4_NTC.42
  crRNA array
  misc_feature (148)..(157): n is a, c, g, or t
cttggctttatatatcttgtggaaaggacgaaacaccgtaatttctactaagtgtagattccaccccccaccctgtctctaatttctactaagtgtagatggtcaaatcgcggcgataactaatttctactaagtgtagatttttttnnnnnnnnnnaagcttggcgtggatccgatatcaactagatcttgagacaaatggcagtattcatccacaattttaaaagaaaaggggggattggggggtacagtgcaggggaaagaatagtagacataatagcaacagacatacaaactaaag

SEQ ID NO: 19732 - DNA, 301 bp, Artificial Sequence
  Trp53.4_NTC.43
  crRNA array
  misc_feature (148)..(157): n is a, c, g, or t
cttggctttatatatcttgtggaaaggacgaaacaccgtaatttctactaagtgtagattccaccccccaccctgtctctaatttctactaagtgtagatcgactcgcgcattgaactggtaatttctactaagtgtagatttttttnnnnnnnnnnaagcttggcgtggatccgatatcaactagatcttgagacaaatggcagtattcatccacaattttaaaagaaaaggggggattggggggtacagtgcaggggaaagaatagtagacataatagcaacagacatacaaactaaag

SEQ ID NO: 19733 - DNA, 301 bp, Artificial Sequence
  Trp53.4_NTC.44
  crRNA array
  misc_feature (148)..(157): n is a, c, g, or t
cttggctttatatatcttgtggaaaggacgaaacaccgtaatttctactaagtgtagattccaccccccaccctgtctctaatttctactaagtgtagatagcgtcgtacgatttatcgttaatttctactaagtgtagatttttttnnnnnnnnnnaagcttggcgtggatccgatatcaactagatcttgagacaaatggcagtattcatccacaattttaaaagaaaaggggggattggggggtacagtgcaggggaaagaatagtagacataatagcaacagacatacaaactaaag

SEQ ID NO: 19734 - DNA, 301 bp, Artificial Sequence
  Trp53.4_NTC.45
  crRNA array
  misc_feature (148)..(157): n is a, c, g, or t
cttggctttatatatcttgtggaaaggacgaaacaccgtaatttctactaagtgtagattccaccccccaccctgtctctaatttctactaagtgtagatcggaacgcgtgatactagggtaatttctactaagtgtagatttttttnnnnnnnnnnaagcttggcgtggatccgatatcaactagatcttgagacaaatggcagtattcatccacaattttaaaagaaaaggggggattggggggtacagtgcaggggaaagaatagtagacataatagcaacagacatacaaactaaag

SEQ ID NO: 19735 - DNA, 301 bp, Artificial Sequence
  Trp53.4_NTC.46
  crRNA array
  misc_feature (148)..(157): n is a, c, g, or t
cttggctttatatatcttgtggaaaggacgaaacaccgtaatttctactaagtgtagattccaccccccaccctgtctctaatttctactaagtgtagatagcgggtcgtagacgcgcggtaatttctactaagtgtagatttttttnnnnnnnnnnaagcttggcgtggatccgatatcaactagatcttgagacaaatggcagtattcatccacaattttaaaagaaaaggggggattggggggtacagtgcaggggaaagaatagtagacataatagcaacagacatacaaactaaag

SEQ ID NO: 19736 - DNA, 301 bp, Artificial Sequence
  Trp53.4_NTC.47
  crRNA array
  misc_feature (148)..(157): n is a, c, g, or t
cttggctttatatatcttgtggaaaggacgaaacaccgtaatttctactaagtgtagattccaccccccaccctgtctctaatttctactaagtgtagattctcgtatcgcgattgttaataatttctactaagtgtagatttttttnnnnnnnnnnaagcttggcgtggatccgatatcaactagatcttgagacaaatggcagtattcatccacaattttaaaagaaaaggggggattggggggtacagtgcaggggaaagaatagtagacataatagcaacagacatacaaactaaag

SEQ ID NO: 19737 - DNA, 301 bp, Artificial Sequence
  Trp53.4_NTC.48
  crRNA array
  misc_feature (148)..(157): n is a, c, g, or t
cttggctttatatatcttgtggaaaggacgaaacaccgtaatttctactaagtgtagattccaccccccaccctgtctctaatttctactaagtgtagatcggtcgactacggctgttagtaatttctactaagtgtagatttttttnnnnnnnnnnaagcttggcgtggatccgatatcaactagatcttgagacaaatggcagtattcatccacaattttaaaagaaaaggggggattggggggtacagtgcaggggaaagaatagtagacataatagcaacagacatacaaactaaag

SEQ ID NO: 19738 - DNA, 301 bp, Artificial Sequence
  Trp53.4_NTC.49
  crRNA array
  misc_feature (148)..(157): n is a, c, g, or t
cttggctttatatatcttgtggaaaggacgaaacaccgtaatttctactaagtgtagattccaccccccaccctgtctctaatttctactaagtgtagattcggggcgcgtcaactgaattaatttctactaagtgtagatttttttnnnnnnnnnnaagcttggcgtggatccgatatcaactagatcttgagacaaatggcagtattcatccacaattttaaaagaaaaggggggattggggggtacagtgcaggggaaagaatagtagacataatagcaacagacatacaaactaaag

SEQ ID NO: 19739 - DNA, 301 bp, Artificial Sequence
  Trp53.4_NTC.5
  crRNA array
  misc_feature (148)..(157): n is a, c, g, or t
cttggctttatatatcttgtggaaaggacgaaacaccgtaatttctactaagtgtagattccaccccccaccctgtctctaatttctactaagtgtagatgcttacgcgtcgcgaatgtataatttctactaagtgtagatttttttnnnnnnnnnnaagcttggcgtggatccgatatcaactagatcttgagacaaatggcagtattcatccacaattttaaaagaaaaggggggattggggggtacagtgcaggggaaagaatagtagacataatagcaacagacatacaaactaaag

SEQ ID NO: 19740 - DNA, 301 bp, Artificial Sequence
  Trp53.4_NTC.50
  crRNA array
  misc_feature (148)..(157): n is a, c, g, or t
cttggctttatatatcttgtggaaaggacgaaacaccgtaatttctactaagtgtagattccaccccccaccctgtctctaatttctactaagtgtagatattgccgctcgcgcaaaatctaatttctactaagtgtagatttttttnnnnnnnnnnaagcttggcgtggatccgatatcaactagatcttgagacaaatggcagtattcatccacaattttaaaagaaaaggggggattggggggtacagtgcaggggaaagaatagtagacataatagcaacagacatacaaactaaag

SEQ ID NO: 19741 - DNA, 301 bp, Artificial Sequence
  Trp53.4_NTC.51
  crRNA array
  misc_feature (148)..(157): n is a, c, g, or t
cttggctttatatatcttgtggaaaggacgaaacaccgtaatttctactaagtgtagattccaccccccaccctgtctctaatttctactaagtgtagattaacgcgcaacacgccaatgtaatttctactaagtgtagatttttttnnnnnnnnnnaagcttggcgtggatccgatatcaactagatcttgagacaaatggcagtattcatccacaattttaaaagaaaaggggggattggggggtacagtgcaggggaaagaatagtagacataatagcaacagacatacaaactaaag

SEQ ID NO: 19742 - DNA, 301 bp, Artificial Sequence
  Trp53.4_NTC.6
  crRNA array
  misc_feature (148)..(157): n is a, c, g, or t
cttggctttatatatcttgtggaaaggacgaaacaccgtaatttctactaagtgtagattccaccccccaccctgtctctaatttctactaagtgtagatcgaatcgcgcctacgggaattaatttctactaagtgtagatttttttnnnnnnnnnnaagcttggcgtggatccgatatcaactagatcttgagacaaatggcagtattcatccacaattttaaaagaaaaggggggattggggggtacagtgcaggggaaagaatagtagacataatagcaacagacatacaaactaaag

SEQ ID NO: 19743 - DNA, 301 bp, Artificial Sequence
  Trp53.4_NTC.7
  crRNA array
  misc_feature (148)..(157): n is a, c, g, or t
cttggctttatatatcttgtggaaaggacgaaacaccgtaatttctactaagtgtagattccaccccccaccctgtctctaatttctactaagtgtagatcgccgaacggataagactattaatttctactaagtgtagatttttttnnnnnnnnnnaagcttggcgtggatccgatatcaactagatcttgagacaaatggcagtattcatccacaattttaaaagaaaaggggggattggggggtacagtgcaggggaaagaatagtagacataatagcaacagacatacaaactaaag

SEQ ID NO: 19744 - DNA, 301 bp, Artificial Sequence
  Trp53.4_NTC.8
  crRNA array
  misc_feature (148)..(157): n is a, c, g, or t
cttggctttatatatcttgtggaaaggacgaaacaccgtaatttctactaagtgtagattccaccccccaccctgtctctaatttctactaagtgtagatcgaccgaggttacgctgggataatttctactaagtgtagatttttttnnnnnnnnnnaagcttggcgtggatccgatatcaactagatcttgagacaaatggcagtattcatccacaattttaaaagaaaaggggggattggggggtacagtgcaggggaaagaatagtagacataatagcaacagacatacaaactaaag

SEQ ID NO: 19745 - DNA, 301 bp, Artificial Sequence
  Trp53.4_NTC.9
  crRNA array
  misc_feature (148)..(157): n is a, c, g, or t
cttggctttatatatcttgtggaaaggacgaaacaccgtaatttctactaagtgtagattccaccccccaccctgtctctaatttctactaagtgtagatatcgccgtacggctatggcataatttctactaagtgtagatttttttnnnnnnnnnnaagcttggcgtggatccgatatcaactagatcttgagacaaatggcagtattcatccacaattttaaaagaaaaggggggattggggggtacagtgcaggggaaagaatagtagacataatagcaacagacatacaaactaaag

SEQ ID NO: 19746 - DNA, 301 bp, Artificial Sequence
  Ube2g2.1_NTC.0
  crRNA array
  misc_feature (148)..(157): n is a, c, g, or t
cttggctttatatatcttgtggaaaggacgaaacaccgtaatttctactaagtgtagatgtgtgggtctcctgggggcctaatttctactaagtgtagattatagcgtcgcgcgctaatttaatttctactaagtgtagatttttttnnnnnnnnnnaagcttggcgtggatccgatatcaactagatcttgagacaaatggcagtattcatccacaattttaaaagaaaaggggggattggggggtacagtgcaggggaaagaatagtagacataatagcaacagacatacaaactaaag

SEQ ID NO: 19747 - DNA, 301 bp, Artificial Sequence
  Ube2g2.1_NTC.1
  crRNA array
  misc_feature (148)..(157): n is a, c, g, or t
cttggctttatatatcttgtggaaaggacgaaacaccgtaatttctactaagtgtagatgtgtgggtctcctgggggcctaatttctactaagtgtagatcgcgtaaccgttccggctcctaatttctactaagtgtagatttttttnnnnnnnnnnaagcttggcgtggatccgatatcaactagatcttgagacaaatggcagtattcatccacaattttaaaagaaaaggggggattggggggtacagtgcaggggaaagaatagtagacataatagcaacagacatacaaactaaag

SEQ ID NO: 19748 - DNA, 301 bp, Artificial Sequence
  Ube2g2.1_NTC.10
  crRNA array
  misc_feature (148)..(157): n is a, c, g, or t
cttggctttatatatcttgtggaaaggacgaaacaccgtaatttctactaagtgtagatgtgtgggtctcctgggggcctaatttctactaagtgtagatcgctaagttcgcgcgggccgtaatttctactaagtgtagatttttttnnnnnnnnnnaagcttggcgtggatccgatatcaactagatcttgagacaaatggcagtattcatccacaattttaaaagaaaaggggggattggggggtacagtgcaggggaaagaatagtagacataatagcaacagacatacaaactaaag

SEQ ID NO: 19749 - DNA, 301 bp, Artificial Sequence
  Ube2g2.1_NTC.11
  crRNA array
  misc_feature (148)..(157): n is a, c, g, or t
cttggctttatatatcttgtggaaaggacgaaacaccgtaatttctactaagtgtagatgtgtgggtctcctgggggcctaatttctactaagtgtagatcgttcgtcgacgaagcaatctaatttctactaagtgtagatttttttnnnnnnnnnnaagcttggcgtggatccgatatcaactagatcttgagacaaatggcagtattcatccacaattttaaaagaaaaggggggattggggggtacagtgcaggggaaagaatagtagacataatagcaacagacatacaaactaaag

SEQ ID NO: 19750 - DNA, 301 bp, Artificial Sequence
  Ube2g2.1_NTC.12
  crRNA array
  misc_feature (148)..(157): n is a, c, g, or t
cttggctttatatatcttgtggaaaggacgaaacaccgtaatttctactaagtgtagatgtgtgggtctcctgggggcctaatttctactaagtgtagatcgccgacgattaatcaatagtaatttctactaagtgtagatttttttnnnnnnnnnnaagcttggcgtggatccgatatcaactagatcttgagacaaatggcagtattcatccacaattttaaaagaaaaggggggattggggggtacagtgcaggggaaagaatagtagacataatagcaacagacatacaaactaaag

SEQ ID NO: 19751 - DNA, 301 bp, Artificial Sequence
  Ube2g2.1_NTC.13
  crRNA array
  misc_feature (148)..(157): n is a, c, g, or t
cttggctttatatatcttgtggaaaggacgaaacaccgtaatttctactaagtgtagatgtgtgggtctcctgggggcctaatttctactaagtgtagatgaccgttgtatcgcgatcaataatttctactaagtgtagatttttttnnnnnnnnnnaagcttggcgtggatccgatatcaactagatcttgagacaaatggcagtattcatccacaattttaaaagaaaaggggggattggggggtacagtgcaggggaaagaatagtagacataatagcaacagacatacaaactaaag

SEQ ID NO: 19752 - DNA, 301 bp, Artificial Sequence
  Ube2g2.1_NTC.14
  crRNA array
  misc_feature (148)..(157): n is a, c, g, or t
cttggctttatatatcttgtggaaaggacgaaacaccgtaatttctactaagtgtagatgtgtgggtctcctgggggcctaatttctactaagtgtagatccgttcgtgcgatagtgttttaatttctactaagtgtagatttttttnnnnnnnnnnaagcttggcgtggatccgatatcaactagatcttgagacaaatggcagtattcatccacaattttaaaagaaaaggggggattggggggtacagtgcaggggaaagaatagtagacataatagcaacagacatacaaactaaag

SEQ ID NO: 19753 - DNA, 301 bp, Artificial Sequence
  Ube2g2.1_NTC.15
  crRNA array
  misc_feature (148)..(157): n is a, c, g, or t
cttggctttatatatcttgtggaaaggacgaaacaccgtaatttctactaagtgtagatgtgtgggtctcctgggggcctaatttctactaagtgtagatgttgtcgtgccgcgaatttataatttctactaagtgtagatttttttnnnnnnnnnnaagcttggcgtggatccgatatcaactagatcttgagacaaatggcagtattcatccacaattttaaaagaaaaggggggattggggggtacagtgcaggggaaagaatagtagacataatagcaacagacatacaaactaaag

SEQ ID NO: 19754 - DNA, 301 bp, Artificial Sequence
  Ube2g2.1_NTC.16
  crRNA array
  misc_feature (148)..(157): n is a, c, g, or t
cttggctttatatatcttgtggaaaggacgaaacaccgtaatttctactaagtgtagatgtgtgggtctcctgggggcctaatttctactaagtgtagatcggtacgttagacgaaaatttaatttctactaagtgtagatttttttnnnnnnnnnnaagcttggcgtggatccgatatcaactagatcttgagacaaatggcagtattcatccacaattttaaaagaaaaggggggattggggggtacagtgcaggggaaagaatagtagacataatagcaacagacatacaaactaaag

SEQ ID NO: 19755 - DNA, 301 bp, Artificial Sequence
  Ube2g2.1_NTC.17
  crRNA array
  misc_feature (148)..(157): n is a, c, g, or t
cttggctttatatatcttgtggaaaggacgaaacaccgtaatttctactaagtgtagatgtgtgggtctcctgggggcctaatttctactaagtgtagattatcgaacgctatcgaacgttaatttctactaagtgtagatttttttnnnnnnnnnnaagcttggcgtggatccgatatcaactagatcttgagacaaatggcagtattcatccacaattttaaaagaaaaggggggattggggggtacagtgcaggggaaagaatagtagacataatagcaacagacatacaaactaaag

SEQ ID NO: 19756 - DNA, 301 bp, Artificial Sequence
  Ube2g2.1_NTC.18
  crRNA array
  misc_feature (148)..(157): n is a, c, g, or t
cttggctttatatatcttgtggaaaggacgaaacaccgtaatttctactaagtgtagatgtgtgggtctcctgggggcctaatttctactaagtgtagattccggttacgaccggcaaaataatttctactaagtgtagatttttttnnnnnnnnnnaagcttggcgtggatccgatatcaactagatcttgagacaaatggcagtattcatccacaattttaaaagaaaaggggggattggggggtacagtgcaggggaaagaatagtagacataatagcaacagacatacaaactaaag

SEQ ID NO: 19757 - DNA, 301 bp, Artificial Sequence
  Ube2g2.1_NTC.19
  crRNA array
  misc_feature (148)..(157): n is a, c, g, or t
cttggctttatatatcttgtggaaaggacgaaacaccgtaatttctactaagtgtagatgtgtgggtctcctgggggcctaatttctactaagtgtagatcgtcgtagaacgatacccgataatttctactaagtgtagatttttttnnnnnnnnnnaagcttggcgtggatccgatatcaactagatcttgagacaaatggcagtattcatccacaattttaaaagaaaaggggggattggggggtacagtgcaggggaaagaatagtagacataatagcaacagacatacaaactaaag

SEQ ID NO: 19758 - DNA, 301 bp, Artificial Sequence
  Ube2g2.1_NTC.2
  crRNA array
  misc_feature (148)..(157): n is a, c, g, or t
cttggctttatatatcttgtggaaaggacgaaacaccgtaatttctactaagtgtagatgtgtgggtctcctgggggcctaatttctactaagtgtagatttatgtcgcgccgcgacccgtaatttctactaagtgtagatttttttnnnnnnnnnnaagcttggcgtggatccgatatcaactagatcttgagacaaatggcagtattcatccacaattttaaaagaaaaggggggattggggggtacagtgcaggggaaagaatagtagacataatagcaacagacatacaaactaaag

SEQ ID NO: 19759 - DNA, 301 bp, Artificial Sequence
  Ube2g2.1_NTC.20
  crRNA array
  misc_feature (148)..(157): n is a, c, g, or t
cttggctttatatatcttgtggaaaggacgaaacaccgtaatttctactaagtgtagatgtgtgggtctcctgggggcctaatttctactaagtgtagatattccggcgcgaccagaagataatttctactaagtgtagatttttttnnnnnnnnnnaagcttggcgtggatccgatatcaactagatcttgagacaaatggcagtattcatccacaattttaaaagaaaaggggggattggggggtacagtgcaggggaaagaatagtagacataatagcaacagacatacaaactaaag

SEQ ID NO: 19760 - DNA, 301 bp, Artificial Sequence
  Ube2g2.1_NTC.21
  crRNA array
  misc_feature (148)..(157): n is a, c, g, or t
cttggctttatatatcttgtggaaaggacgaaacaccgtaatttctactaagtgtagatgtgtgggtctcctgggggcctaatttctactaagtgtagatgtataacttcgcgcggtccgtaatttctactaagtgtagatttttttnnnnnnnnnnaagcttggcgtggatccgatatcaactagatcttgagacaaatggcagtattcatccacaattttaaaagaaaaggggggattggggggtacagtgcaggggaaagaatagtagacataatagcaacagacatacaaactaaag

SEQ ID NO: 19761 - DNA, 301 bp, Artificial Sequence
  Ube2g2.1_NTC.22
  crRNA array
  misc_feature (148)..(157): n is a, c, g, or t
cttggctttatatatcttgtggaaaggacgaaacaccgtaatttctactaagtgtagatgtgtgggtctcctgggggcctaatttctactaagtgtagatgcgcgtcaacgtaatgtgcctaatttctactaagtgtagatttttttnnnnnnnnnnaagcttggcgtggatccgatatcaactagatcttgagacaaatggcagtattcatccacaattttaaaagaaaaggggggattggggggtacagtgcaggggaaagaatagtagacataatagcaacagacatacaaactaaag

SEQ ID NO: 19762 - DNA, 301 bp, Artificial Sequence
  Ube2g2.1_NTC.23
  crRNA array
  misc_feature (148)..(157): n is a, c, g, or t
cttggctttatatatcttgtggaaaggacgaaacaccgtaatttctactaagtgtagatgtgtgggtctcctgggggcctaatttctactaagtgtagatacgcgctattatcgtaggtgtaatttctactaagtgtagatttttttnnnnnnnnnnaagcttggcgtggatccgatatcaactagatcttgagacaaatggcagtattcatccacaattttaaaagaaaaggggggattggggggtacagtgcaggggaaagaatagtagacataatagcaacagacatacaaactaaag

SEQ ID NO: 19763 - DNA, 301 bp, Artificial Sequence
  Ube2g2.1_NTC.24
  crRNA array
  misc_feature (148)..(157): n is a, c, g, or t
cttggctttatatatcttgtggaaaggacgaaacaccgtaatttctactaagtgtagatgtgtgggtctcctgggggcctaatttctactaagtgtagatactatcgacgttcgtcccggtaatttctactaagtgtagatttttttnnnnnnnnnnaagcttggcgtggatccgatatcaactagatcttgagacaaatggcagtattcatccacaattttaaaagaaaaggggggattggggggtacagtgcaggggaaagaatagtagacataatagcaacagacatacaaactaaag

SEQ ID NO: 19764 - DNA, 301 bp, Artificial Sequence
  Ube2g2.1_NTC.25
  crRNA array
  misc_feature (148)..(157): n is a, c, g, or t
cttggctttatatatcttgtggaaaggacgaaacaccgtaatttctactaagtgtagatgtgtgggtctcctgggggcctaatttctactaagtgtagattcgcgttatcgtgccgtgcgtaatttctactaagtgtagatttttttnnnnnnnnnnaagcttggcgtggatccgatatcaactagatcttgagacaaatggcagtattcatccacaattttaaaagaaaaggggggattggggggtacagtgcaggggaaagaatagtagacataatagcaacagacatacaaactaaag

SEQ ID NO: 19765 - DNA, 301 bp, Artificial Sequence
  Ube2g2.1_NTC.26
  crRNA array
  misc_feature (148)..(157): n is a, c, g, or t
cttggctttatatatcttgtggaaaggacgaaacaccgtaatttctactaagtgtagatgtgtgggtctcctgggggcctaatttctactaagtgtagatcgcgacggcggttttaacactaatttctactaagtgtagatttttttnnnnnnnnnnaagcttggcgtggatccgatatcaactagatcttgagacaaatggcagtattcatccacaattttaaaagaaaaggggggattggggggtacagtgcaggggaaagaatagtagacataatagcaacagacatacaaactaaag

SEQ ID NO: 19766 - DNA, 301 bp, Artificial Sequence
  Ube2g2.1_NTC.27
  crRNA array
  misc_feature (148)..(157): n is a, c, g, or t
cttggctttatatatcttgtggaaaggacgaaacaccgtaatttctactaagtgtagatgtgtgggtctcctgggggcctaatttctactaagtgtagatgtcgcgttgcgaccggcgcttaatttctactaagtgtagatttttttnnnnnnnnnnaagcttggcgtggatccgatatcaactagatcttgagacaaatggcagtattcatccacaattttaaaagaaaaggggggattggggggtacagtgcaggggaaagaatagtagacataatagcaacagacatacaaactaaag

SEQ ID NO: 19767 - DNA, 301 bp, Artificial Sequence
  Ube2g2.1_NTC.28
  crRNA array
  misc_feature (148)..(157): n is a, c, g, or t
cttggctttatatatcttgtggaaaggacgaaacaccgtaatttctactaagtgtagatgtgtgggtctcctgggggcctaatttctactaagtgtagataccgctaatcggcgtaaacttaatttctactaagtgtagatttttttnnnnnnnnnnaagcttggcgtggatccgatatcaactagatcttgagacaaatggcagtattcatccacaattttaaaagaaaaggggggattggggggtacagtgcaggggaaagaatagtagacataatagcaacagacatacaaactaaag

SEQ ID NO: 19768 - DNA, 301 bp, Artificial Sequence
  Ube2g2.1_NTC.29
  crRNA array
  misc_feature (148)..(157): n is a, c, g, or t
cttggctttatatatcttgtggaaaggacgaaacaccgtaatttctactaagtgtagatgtgtgggtctcctgggggcctaatttctactaagtgtagatcgcgatctataccgtctatataatttctactaagtgtagatttttttnnnnnnnnnnaagcttggcgtggatccgatatcaactagatcttgagacaaatggcagtattcatccacaattttaaaagaaaaggggggattggggggtacagtgcaggggaaagaatagtagacataatagcaacagacatacaaactaaag

SEQ ID NO: 19769 - DNA, 301 bp, Artificial Sequence
  Ube2g2.1_NTC.3
  crRNA array
  misc_feature (148)..(157): n is a, c, g, or t
cttggctttatatatcttgtggaaaggacgaaacaccgtaatttctactaagtgtagatgtgtgggtctcctgggggcctaatttctactaagtgtagattcgacgcgagacgacgtacataatttctactaagtgtagatttttttnnnnnnnnnnaagcttggcgtggatccgatatcaactagatcttgagacaaatggcagtattcatccacaattttaaaagaaaaggggggattggggggtacagtgcaggggaaagaatagtagacataatagcaacagacatacaaactaaag

SEQ ID NO: 19770 - DNA, 301 bp, Artificial Sequence
  Ube2g2.1_NTC.30
  crRNA array
  misc_feature (148)..(157): n is a, c, g, or t
cttggctttatatatcttgtggaaaggacgaaacaccgtaatttctactaagtgtagatgtgtgggtctcctgggggcctaatttctactaagtgtagatcgatcgtacgggtgtcctaataatttctactaagtgtagatttttttnnnnnnnnnnaagcttggcgtggatccgatatcaactagatcttgagacaaatggcagtattcatccacaattttaaaagaaaaggggggattggggggtacagtgcaggggaaagaatagtagacataatagcaacagacatacaaactaaag

SEQ ID NO: 19771 - DNA, 301 bp, Artificial Sequence
  Ube2g2.1_NTC.31
  crRNA array
  misc_feature (148)..(157): n is a, c, g, or t
cttggctttatatatcttgtggaaaggacgaaacaccgtaatttctactaagtgtagatgtgtgggtctcctgggggcctaatttctactaagtgtagatgccgaccgcgtgattgtaggtaatttctactaagtgtagatttttttnnnnnnnnnnaagcttggcgtggatccgatatcaactagatcttgagacaaatggcagtattcatccacaattttaaaagaaaaggggggattggggggtacagtgcaggggaaagaatagtagacataatagcaacagacatacaaactaaag

SEQ ID NO: 19772 - DNA, 301 bp, Artificial Sequence
  Ube2g2.1_NTC.32
  crRNA array
  misc_feature (148)..(157): n is a, c, g, or t
cttggctttatatatcttgtggaaaggacgaaacaccgtaatttctactaagtgtagatgtgtgggtctcctgggggcctaatttctactaagtgtagatgcacgttacgcccgggtcactaatttctactaagtgtagatttttttnnnnnnnnnnaagcttggcgtggatccgatatcaactagatcttgagacaaatggcagtattcatccacaattttaaaagaaaaggggggattggggggtacagtgcaggggaaagaatagtagacataatagcaacagacatacaaactaaag

SEQ ID NO: 19773 - DNA, 301 bp, Artificial Sequence
  Ube2g2.1_NTC.33
  crRNA array
  misc_feature (148)..(157): n is a, c, g, or t
cttggctttatatatcttgtggaaaggacgaaacaccgtaatttctactaagtgtagatgtgtgggtctcctgggggcctaatttctactaagtgtagattaagcgaccgacgcattcgctaatttctactaagtgtagatttttttnnnnnnnnnnaagcttggcgtggatccgatatcaactagatcttgagacaaatggcagtattcatccacaattttaaaagaaaaggggggattggggggtacagtgcaggggaaagaatagtagacataatagcaacagacatacaaactaaag

SEQ ID NO: 19774 - DNA, 301 bp, Artificial Sequence
  Ube2g2.1_NTC.34
  crRNA array
  misc_feature (148)..(157): n is a, c, g, or t
cttggctttatatatcttgtggaaaggacgaaacaccgtaatttctactaagtgtagatgtgtgggtctcctgggggcctaatttctactaagtgtagattagcgttcgacacgtgaaactaatttctactaagtgtagatttttttnnnnnnnnnnaagcttggcgtggatccgatatcaactagatcttgagacaaatggcagtattcatccacaattttaaaagaaaaggggggattggggggtacagtgcaggggaaagaatagtagacataatagcaacagacatacaaactaaag

SEQ ID NO: 19775 - DNA, 301 bp, Artificial Sequence
  Ube2g2.1_NTC.35
  crRNA array
  misc_feature (148)..(157): n is a, c, g, or t
cttggctttatatatcttgtggaaaggacgaaacaccgtaatttctactaagtgtagatgtgtgggtctcctgggggcctaatttctactaagtgtagattggcgcgtaatcgctattcgtaatttctactaagtgtagatttttttnnnnnnnnnnaagcttggcgtggatccgatatcaactagatcttgagacaaatggcagtattcatccacaattttaaaagaaaaggggggattggggggtacagtgcaggggaaagaatagtagacataatagcaacagacatacaaactaaag

SEQ ID NO: 19776 - DNA, 301 bp, Artificial Sequence
  Ube2g2.1_NTC.36
  crRNA array
  misc_feature (148)..(157): n is a, c, g, or t
cttggctttatatatcttgtggaaaggacgaaacaccgtaatttctactaagtgtagatgtgtgggtctcctgggggcctaatttctactaagtgtagatcaacccgccgtagcgggccttaatttctactaagtgtagatttttttnnnnnnnnnnaagcttggcgtggatccgatatcaactagatcttgagacaaatggcagtattcatccacaattttaaaagaaaaggggggattggggggtacagtgcaggggaaagaatagtagacataatagcaacagacatacaaactaaag

SEQ ID NO: 19777 - DNA, 301 bp, Artificial Sequence
  Ube2g2.1_NTC.37
  crRNA array
  misc_feature (148)..(157): n is a, c, g, or t
cttggctttatatatcttgtggaaaggacgaaacaccgtaatttctactaagtgtagatgtgtgggtctcctgggggcctaatttctactaagtgtagattttgcgttgacgcgattacttaatttctactaagtgtagatttttttnnnnnnnnnnaagcttggcgtggatccgatatcaactagatcttgagacaaatggcagtattcatccacaattttaaaagaaaaggggggattggggggtacagtgcaggggaaagaatagtagacataatagcaacagacatacaaactaaag

SEQ ID NO: 19778 - DNA, 301 bp, Artificial Sequence
  Ube2g2.1_NTC.38
  crRNA array
  misc_feature (148)..(157): n is a, c, g, or t
cttggctttatatatcttgtggaaaggacgaaacaccgtaatttctactaagtgtagatgtgtgggtctcctgggggcctaatttctactaagtgtagataacggagcgcgatactaccataatttctactaagtgtagatttttttnnnnnnnnnnaagcttggcgtggatccgatatcaactagatcttgagacaaatggcagtattcatccacaattttaaaagaaaaggggggattggggggtacagtgcaggggaaagaatagtagacataatagcaacagacatacaaactaaag

SEQ ID NO: 19779 - DNA, 301 bp, Artificial Sequence
  Ube2g2.1_NTC.39
  crRNA array
  misc_feature (148)..(157): n is a, c, g, or t
cttggctttatatatcttgtggaaaggacgaaacaccgtaatttctactaagtgtagatgtgtgggtctcctgggggcctaatttctactaagtgtagatccggacgttataacgtttcttaatttctactaagtgtagatttttttnnnnnnnnnnaagcttggcgtggatccgatatcaactagatcttgagacaaatggcagtattcatccacaattttaaaagaaaaggggggattggggggtacagtgcaggggaaagaatagtagacataatagcaacagacatacaaactaaag

SEQ ID NO: 19780 - DNA, 301 bp, Artificial Sequence
  Ube2g2.1_NTC.4
  crRNA array
  misc_feature (148)..(157): n is a, c, g, or t
cttggctttatatatcttgtggaaaggacgaaacaccgtaatttctactaagtgtagatgtgtgggtctcctgggggcctaatttctactaagtgtagatatacccgtcgcgaacgtgagtaatttctactaagtgtagatttttttnnnnnnnnnnaagcttggcgtggatccgatatcaactagatcttgagacaaatggcagtattcatccacaattttaaaagaaaaggggggattggggggtacagtgcaggggaaagaatagtagacataatagcaacagacatacaaactaaag

SEQ ID NO: 19781 - DNA, 301 bp, Artificial Sequence
  Ube2g2.1_NTC.40
  crRNA array
  misc_feature (148)..(157): n is a, c, g, or t
cttggctttatatatcttgtggaaaggacgaaacaccgtaatttctactaagtgtagatgtgtgggtctcctgggggcctaatttctactaagtgtagatattcgcgaacccggccggaataatttctactaagtgtagatttttttnnnnnnnnnnaagcttggcgtggatccgatatcaactagatcttgagacaaatggcagtattcatccacaattttaaaagaaaaggggggattggggggtacagtgcaggggaaagaatagtagacataatagcaacagacatacaaactaaag

SEQ ID NO: 19782 - DNA, 301 bp, Artificial Sequence
  Ube2g2.1_NTC.41
  crRNA array
  misc_feature (148)..(157): n is a, c, g, or t
cttggctttatatatcttgtggaaaggacgaaacaccgtaatttctactaagtgtagatgtgtgggtctcctgggggcctaatttctactaagtgtagatttgatggcgcgacgcgttattaatttctactaagtgtagatttttttnnnnnnnnnnaagcttggcgtggatccgatatcaactagatcttgagacaaatggcagtattcatccacaattttaaaagaaaaggggggattggggggtacagtgcaggggaaagaatagtagacataatagcaacagacatacaaactaaag

SEQ ID NO: 19783 - DNA, 301 bp, Artificial Sequence
  Ube2g2.1_NTC.42
  crRNA array
  misc_feature (148)..(157): n is a, c, g, or t
cttggctttatatatcttgtggaaaggacgaaacaccgtaatttctactaagtgtagatgtgtgggtctcctgggggcctaatttctactaagtgtagatggtcaaatcgcggcgataactaatttctactaagtgtagatttttttnnnnnnnnnnaagcttggcgtggatccgatatcaactagatcttgagacaaatggcagtattcatccacaattttaaaagaaaaggggggattggggggtacagtgcaggggaaagaatagtagacataatagcaacagacatacaaactaaag

SEQ ID NO: 19784 - DNA, 301 bp, Artificial Sequence
  Ube2g2.1_NTC.43
  crRNA array
  misc_feature (148)..(157): n is a, c, g, or t
cttggctttatatatcttgtggaaaggacgaaacaccgtaatttctactaagtgtagatgtgtgggtctcctgggggcctaatttctactaagtgtagatcgactcgcgcattgaactggtaatttctactaagtgtagatttttttnnnnnnnnnnaagcttggcgtggatccgatatcaactagatcttgagacaaatggcagtattcatccacaattttaaaagaaaaggggggattggggggtacagtgcaggggaaagaatagtagacataatagcaacagacatacaaactaaag

SEQ ID NO: 19785 - DNA, 301 bp, Artificial Sequence
  Ube2g2.1_NTC.44
  crRNA array
  misc_feature (148)..(157): n is a, c, g, or t
cttggctttatatatcttgtggaaaggacgaaacaccgtaatttctactaagtgtagatgtgtgggtctcctgggggcctaatttctactaagtgtagatagcgtcgtacgatttatcgttaatttctactaagtgtagatttttttnnnnnnnnnnaagcttggcgtggatccgatatcaactagatcttgagacaaatggcagtattcatccacaattttaaaagaaaaggggggattggggggtacagtgcaggggaaagaatagtagacataatagcaacagacatacaaactaaag

SEQ ID NO: 19786 - DNA, 301 bp, Artificial Sequence
  Ube2g2.1_NTC.45
  crRNA array
  misc_feature (148)..(157): n is a, c, g, or t
cttggctttatatatcttgtggaaaggacgaaacaccgtaatttctactaagtgtagatgtgtgggtctcctgggggcctaatttctactaagtgtagatcggaacgcgtgatactagggtaatttctactaagtgtagatttttttnnnnnnnnnnaagcttggcgtggatccgatatcaactagatcttgagacaaatggcagtattcatccacaattttaaaagaaaaggggggattggggggtacagtgcaggggaaagaatagtagacataatagcaacagacatacaaactaaag

SEQ ID NO: 19787 - DNA, 301 bp, Artificial Sequence
  Ube2g2.1_NTC.46
  crRNA array
  misc_feature (148)..(157): n is a, c, g, or t
cttggctttatatatcttgtggaaaggacgaaacaccgtaatttctactaagtgtagatgtgtgggtctcctgggggcctaatttctactaagtgtagatagcgggtcgtagacgcgcggtaatttctactaagtgtagatttttttnnnnnnnnnnaagcttggcgtggatccgatatcaactagatcttgagacaaatggcagtattcatccacaattttaaaagaaaaggggggattggggggtacagtgcaggggaaagaatagtagacataatagcaacagacatacaaactaaag

SEQ ID NO: 19788 - DNA, 301 bp, Artificial Sequence
  Ube2g2.1_NTC.47
  crRNA array
  misc_feature (148)..(157): n is a, c, g, or t
cttggctttatatatcttgtggaaaggacgaaacaccgtaatttctactaagtgtagatgtgtgggtctcctgggggcctaatttctactaagtgtagattctcgtatcgcgattgttaataatttctactaagtgtagatttttttnnnnnnnnnnaagcttggcgtggatccgatatcaactagatcttgagacaaatggcagtattcatccacaattttaaaagaaaaggggggattggggggtacagtgcaggggaaagaatagtagacataatagcaacagacatacaaactaaag

SEQ ID NO: 19789 - DNA, 301 bp, Artificial Sequence
  Ube2g2.1_NTC.48
  crRNA array
  misc_feature (148)..(157): n is a, c, g, or t
cttggctttatatatcttgtggaaaggacgaaacaccgtaatttctactaagtgtagatgtgtgggtctcctgggggcctaatttctactaagtgtagatcggtcgactacggctgttagtaatttctactaagtgtagatttttttnnnnnnnnnnaagcttggcgtggatccgatatcaactagatcttgagacaaatggcagtattcatccacaattttaaaagaaaaggggggattggggggtacagtgcaggggaaagaatagtagacataatagcaacagacatacaaactaaag

SEQ ID NO: 19790 - DNA, 301 bp, Artificial Sequence
  Ube2g2.1_NTC.49
  crRNA array
  misc_feature (148)..(157): n is a, c, g, or t
cttggctttatatatcttgtggaaaggacgaaacaccgtaatttctactaagtgtagatgtgtgggtctcctgggggcctaatttctactaagtgtagattcggggcgcgtcaactgaattaatttctactaagtgtagatttttttnnnnnnnnnnaagcttggcgtggatccgatatcaactagatcttgagacaaatggcagtattcatccacaattttaaaagaaaaggggggattggggggtacagtgcaggggaaagaatagtagacataatagcaacagacatacaaactaaag

SEQ ID NO: 19791 - DNA, 301 bp, Artificial Sequence
  Ube2g2.1_NTC.5
  crRNA array
  misc_feature (148)..(157): n is a, c, g, or t
cttggctttatatatcttgtggaaaggacgaaacaccgtaatttctactaagtgtagatgtgtgggtctcctgggggcctaatttctactaagtgtagatgcttacgcgtcgcgaatgtataatttctactaagtgtagatttttttnnnnnnnnnnaagcttggcgtggatccgatatcaactagatcttgagacaaatggcagtattcatccacaattttaaaagaaaaggggggattggggggtacagtgcaggggaaagaatagtagacataatagcaacagacatacaaactaaag

SEQ ID NO: 19792 - DNA, 301 bp, Artificial Sequence
  Ube2g2.1_NTC.50
  crRNA array
  misc_feature (148)..(157): n is a, c, g, or t
cttggctttatatatcttgtggaaaggacgaaacaccgtaatttctactaagtgtagatgtgtgggtctcctgggggcctaatttctactaagtgtagatattgccgctcgcgcaaaatctaatttctactaagtgtagatttttttnnnnnnnnnnaagcttggcgtggatccgatatcaactagatcttgagacaaatggcagtattcatccacaattttaaaagaaaaggggggattggggggtacagtgcaggggaaagaatagtagacataatagcaacagacatacaaactaaag

SEQ ID NO: 19793 - DNA, 301 bp, Artificial Sequence
  Ube2g2.1_NTC.51
  crRNA array
  misc_feature (148)..(157): n is a, c, g, or t
cttggctttatatatcttgtggaaaggacgaaacaccgtaatttctactaagtgtagatgtgtgggtctcctgggggcctaatttctactaagtgtagattaacgcgcaacacgccaatgtaatttctactaagtgtagatttttttnnnnnnnnnnaagcttggcgtggatccgatatcaactagatcttgagacaaatggcagtattcatccacaattttaaaagaaaaggggggattggggggtacagtgcaggggaaagaatagtagacataatagcaacagacatacaaactaaag

SEQ ID NO: 19794 - DNA, 301 bp, Artificial Sequence
  Ube2g2.1_NTC.6
  crRNA array
  misc_feature (148)..(157): n is a, c, g, or t
cttggctttatatatcttgtggaaaggacgaaacaccgtaatttctactaagtgtagatgtgtgggtctcctgggggcctaatttctactaagtgtagatcgaatcgcgcctacgggaattaatttctactaagtgtagatttttttnnnnnnnnnnaagcttggcgtggatccgatatcaactagatcttgagacaaatggcagtattcatccacaattttaaaagaaaaggggggattggggggtacagtgcaggggaaagaatagtagacataatagcaacagacatacaaactaaag

SEQ ID NO: 19795 - DNA, 301 bp, Artificial Sequence
  Ube2g2.1_NTC.7
  crRNA array
  misc_feature (148)..(157): n is a, c, g, or t
cttggctttatatatcttgtggaaaggacgaaacaccgtaatttctactaagtgtagatgtgtgggtctcctgggggcctaatttctactaagtgtagatcgccgaacggataagactattaatttctactaagtgtagatttttttnnnnnnnnnnaagcttggcgtggatccgatatcaactagatcttgagacaaatggcagtattcatccacaattttaaaagaaaaggggggattggggggtacagtgcaggggaaagaatagtagacataatagcaacagacatacaaactaaag

SEQ ID NO: 19796 - DNA, 301 bp, Artificial Sequence
  Ube2g2.1_NTC.8
  crRNA array
  misc_feature (148)..(157): n is a, c, g, or t
cttggctttatatatcttgtggaaaggacgaaacaccgtaatttctactaagtgtagatgtgtgggtctcctgggggcctaatttctactaagtgtagatcgaccgaggttacgctgggataatttctactaagtgtagatttttttnnnnnnnnnnaagcttggcgtggatccgatatcaactagatcttgagacaaatggcagtattcatccacaattttaaaagaaaaggggggattggggggtacagtgcaggggaaagaatagtagacataatagcaacagacatacaaactaaag

SEQ ID NO: 19797 - DNA, 301 bp, Artificial Sequence
  Ube2g2.1_NTC.9
  crRNA array
  misc_feature (148)..(157): n is a, c, g, or t
cttggctttatatatcttgtggaaaggacgaaacaccgtaatttctactaagtgtagatgtgtgggtctcctgggggcctaatttctactaagtgtagatatcgccgtacggctatggcataatttctactaagtgtagatttttttnnnnnnnnnnaagcttggcgtggatccgatatcaactagatcttgagacaaatggcagtattcatccacaattttaaaagaaaaggggggattggggggtacagtgcaggggaaagaatagtagacataatagcaacagacatacaaactaaag

SEQ ID NO: 19798 - DNA, 301 bp, Artificial Sequence
  Ube2g2.2_NTC.0
  crRNA array
  misc_feature (148)..(157): n is a, c, g, or t
cttggctttatatatcttgtggaaaggacgaaacaccgtaatttctactaagtgtagatgcagcgcagcagctgtcatttaatttctactaagtgtagattatagcgtcgcgcgctaatttaatttctactaagtgtagatttttttnnnnnnnnnnaagcttggcgtggatccgatatcaactagatcttgagacaaatggcagtattcatccacaattttaaaagaaaaggggggattggggggtacagtgcaggggaaagaatagtagacataatagcaacagacatacaaactaaag

SEQ ID NO: 19799 - DNA, 301 bp, Artificial Sequence
  Ube2g2.2_NTC.1
  crRNA array
  misc_feature (148)..(157): n is a, c, g, or t
cttggctttatatatcttgtggaaaggacgaaacaccgtaatttctactaagtgtagatgcagcgcagcagctgtcatttaatttctactaagtgtagatcgcgtaaccgttccggctcctaatttctactaagtgtagatttttttnnnnnnnnnnaagcttggcgtggatccgatatcaactagatcttgagacaaatggcagtattcatccacaattttaaaagaaaaggggggattggggggtacagtgcaggggaaagaatagtagacataatagcaacagacatacaaactaaag

SEQ ID NO: 19800 - DNA, 301 bp, Artificial Sequence
  Ube2g2.2_NTC.10
  crRNA array
  misc_feature (148)..(157): n is a, c, g, or t
cttggctttatatatcttgtggaaaggacgaaacaccgtaatttctactaagtgtagatgcagcgcagcagctgtcatttaatttctactaagtgtagatcgctaagttcgcgcgggccgtaatttctactaagtgtagatttttttnnnnnnnnnnaagcttggcgtggatccgatatcaactagatcttgagacaaatggcagtattcatccacaattttaaaagaaaaggggggattggggggtacagtgcaggggaaagaatagtagacataatagcaacagacatacaaactaaag

SEQ ID NO: 19801 - DNA, 301 bp, Artificial Sequence
  Ube2g2.2_NTC.11
  crRNA array
  misc_feature (148)..(157): n is a, c, g, or t
cttggctttatatatcttgtggaaaggacgaaacaccgtaatttctactaagtgtagatgcagcgcagcagctgtcatttaatttctactaagtgtagatcgttcgtcgacgaagcaatctaatttctactaagtgtagatttttttnnnnnnnnnnaagcttggcgtggatccgatatcaactagatcttgagacaaatggcagtattcatccacaattttaaaagaaaaggggggattggggggtacagtgcaggggaaagaatagtagacataatagcaacagacatacaaactaaag

SEQ ID NO: 19802 - DNA, 301 bp, Artificial Sequence
  Ube2g2.2_NTC.12
  crRNA array
  misc_feature (148)..(157): n is a, c, g, or t
cttggctttatatatcttgtggaaaggacgaaacaccgtaatttctactaagtgtagatgcagcgcagcagctgtcatttaatttctactaagtgtagatcgccgacgattaatcaatagtaatttctactaagtgtagatttttttnnnnnnnnnnaagcttggcgtggatccgatatcaactagatcttgagacaaatggcagtattcatccacaattttaaaagaaaaggggggattggggggtacagtgcaggggaaagaatagtagacataatagcaacagacatacaaactaaag

SEQ ID NO: 19803 - DNA, 301 bp, Artificial Sequence
  Ube2g2.2_NTC.13
  crRNA array
  misc_feature (148)..(157): n is a, c, g, or t
cttggctttatatatcttgtggaaaggacgaaacaccgtaatttctactaagtgtagatgcagcgcagcagctgtcatttaatttctactaagtgtagatgaccgttgtatcgcgatcaataatttctactaagtgtagatttttttnnnnnnnnnnaagcttggcgtggatccgatatcaactagatcttgagacaaatggcagtattcatccacaattttaaaagaaaaggggggattggggggtacagtgcaggggaaagaatagtagacataatagcaacagacatacaaactaaag

SEQ ID NO: 19804 - DNA, 301 bp, Artificial Sequence
  Ube2g2.2_NTC.14
  crRNA array
  misc_feature (148)..(157): n is a, c, g, or t
cttggctttatatatcttgtggaaaggacgaaacaccgtaatttctactaagtgtagatgcagcgcagcagctgtcatttaatttctactaagtgtagatccgttcgtgcgatagtgttttaatttctactaagtgtagatttttttnnnnnnnnnnaagcttggcgtggatccgatatcaactagatcttgagacaaatggcagtattcatccacaattttaaaagaaaaggggggattggggggtacagtgcaggggaaagaatagtagacataatagcaacagacatacaaactaaag

SEQ ID NO: 19805 - DNA, 301 bp, Artificial Sequence
  Ube2g2.2_NTC.15
  crRNA array
  misc_feature (148)..(157): n is a, c, g, or t
cttggctttatatatcttgtggaaaggacgaaacaccgtaatttctactaagtgtagatgcagcgcagcagctgtcatttaatttctactaagtgtagatgttgtcgtgccgcgaatttataatttctactaagtgtagatttttttnnnnnnnnnnaagcttggcgtggatccgatatcaactagatcttgagacaaatggcagtattcatccacaattttaaaagaaaaggggggattggggggtacagtgcaggggaaagaatagtagacataatagcaacagacatacaaactaaag

SEQ ID NO: 19806 - DNA, 301 bp, Artificial Sequence
  Ube2g2.2_NTC.16
  crRNA array
  misc_feature (148)..(157): n is a, c, g, or t
cttggctttatatatcttgtggaaaggacgaaacaccgtaatttctactaagtgtagatgcagcgcagcagctgtcatttaatttctactaagtgtagatcggtacgttagacgaaaatttaatttctactaagtgtagatttttttnnnnnnnnnnaagcttggcgtggatccgatatcaactagatcttgagacaaatggcagtattcatccacaattttaaaagaaaaggggggattggggggtacagtgcaggggaaagaatagtagacataatagcaacagacatacaaactaaag

SEQ ID NO: 19807 - DNA, 301 bp, Artificial Sequence
  Ube2g2.2_NTC.17
  crRNA array
  misc_feature (148)..(157): n is a, c, g, or t
cttggctttatatatcttgtggaaaggacgaaacaccgtaatttctactaagtgtagatgcagcgcagcagctgtcatttaatttctactaagtgtagattatcgaacgctatcgaacgttaatttctactaagtgtagatttttttnnnnnnnnnnaagcttggcgtggatccgatatcaactagatcttgagacaaatggcagtattcatccacaattttaaaagaaaaggggggattggggggtacagtgcaggggaaagaatagtagacataatagcaacagacatacaaactaaag

SEQ ID NO: 19808 - DNA, 301 bp, Artificial Sequence
  Ube2g2.2_NTC.18
  crRNA array
  misc_feature (148)..(157): n is a, c, g, or t
cttggctttatatatcttgtggaaaggacgaaacaccgtaatttctactaagtgtagatgcagcgcagcagctgtcatttaatttctactaagtgtagattccggttacgaccggcaaaataatttctactaagtgtagatttttttnnnnnnnnnnaagcttggcgtggatccgatatcaactagatcttgagacaaatggcagtattcatccacaattttaaaagaaaaggggggattggggggtacagtgcaggggaaagaatagtagacataatagcaacagacatacaaactaaag

SEQ ID NO: 19809 - DNA, 301 bp, Artificial Sequence
  Ube2g2.2_NTC.19
  crRNA array
  misc_feature (148)..(157): n is a, c, g, or t
cttggctttatatatcttgtggaaaggacgaaacaccgtaatttctactaagtgtagatgcagcgcagcagctgtcatttaatttctactaagtgtagatcgtcgtagaacgatacccgataatttctactaagtgtagatttttttnnnnnnnnnnaagcttggcgtggatccgatatcaactagatcttgagacaaatggcagtattcatccacaattttaaaagaaaaggggggattggggggtacagtgcaggggaaagaatagtagacataatagcaacagacatacaaactaaag

SEQ ID NO: 19810 - DNA, 301 bp, Artificial Sequence
  Ube2g2.2_NTC.2
  crRNA array
  misc_feature (148)..(157): n is a, c, g, or t
cttggctttatatatcttgtggaaaggacgaaacaccgtaatttctactaagtgtagatgcagcgcagcagctgtcatttaatttctactaagtgtagatttatgtcgcgccgcgacccgtaatttctactaagtgtagatttttttnnnnnnnnnnaagcttggcgtggatccgatatcaactagatcttgagacaaatggcagtattcatccacaattttaaaagaaaaggggggattggggggtacagtgcaggggaaagaatagtagacataatagcaacagacatacaaactaaag

SEQ ID NO: 19811 - DNA, 301 bp, Artificial Sequence
  Ube2g2.2_NTC.20
  crRNA array
  misc_feature (148)..(157): n is a, c, g, or t
cttggctttatatatcttgtggaaaggacgaaacaccgtaatttctactaagtgtagatgcagcgcagcagctgtcatttaatttctactaagtgtagatattccggcgcgaccagaagataatttctactaagtgtagatttttttnnnnnnnnnnaagcttggcgtggatccgatatcaactagatcttgagacaaatggcagtattcatccacaattttaaaagaaaaggggggattggggggtacagtgcaggggaaagaatagtagacataatagcaacagacatacaaactaaag

SEQ ID NO: 19812 - DNA, 301 bp, Artificial Sequence
  Ube2g2.2_NTC.21
  crRNA array
  misc_feature (148)..(157): n is a, c, g, or t
cttggctttatatatcttgtggaaaggacgaaacaccgtaatttctactaagtgtagatgcagcgcagcagctgtcatttaatttctactaagtgtagatgtataacttcgcgcggtccgtaatttctactaagtgtagatttttttnnnnnnnnnnaagcttggcgtggatccgatatcaactagatcttgagacaaatggcagtattcatccacaattttaaaagaaaaggggggattggggggtacagtgcaggggaaagaatagtagacataatagcaacagacatacaaactaaag

SEQ ID NO: 19813 - DNA, 301 bp, Artificial Sequence
  Ube2g2.2_NTC.22
  crRNA array
  misc_feature (148)..(157): n is a, c, g, or t
cttggctttatatatcttgtggaaaggacgaaacaccgtaatttctactaagtgtagatgcagcgcagcagctgtcatttaatttctactaagtgtagatgcgcgtcaacgtaatgtgcctaatttctactaagtgtagatttttttnnnnnnnnnnaagcttggcgtggatccgatatcaactagatcttgagacaaatggcagtattcatccacaattttaaaagaaaaggggggattggggggtacagtgcaggggaaagaatagtagacataatagcaacagacatacaaactaaag

SEQ ID NO: 19814 - DNA, 301 bp, Artificial Sequence
  Ube2g2.2_NTC.23
  crRNA array
  misc_feature (148)..(157): n is a, c, g, or t
cttggctttatatatcttgtggaaaggacgaaacaccgtaatttctactaagtgtagatgcagcgcagcagctgtcatttaatttctactaagtgtagatacgcgctattatcgtaggtgtaatttctactaagtgtagatttttttnnnnnnnnnnaagcttggcgtggatccgatatcaactagatcttgagacaaatggcagtattcatccacaattttaaaagaaaaggggggattggggggtacagtgcaggggaaagaatagtagacataatagcaacagacatacaaactaaag

SEQ ID NO: 19815 - DNA, 301 bp, Artificial Sequence
  Ube2g2.2_NTC.24
  crRNA array
  misc_feature (148)..(157): n is a, c, g, or t
cttggctttatatatcttgtggaaaggacgaaacaccgtaatttctactaagtgtagatgcagcgcagcagctgtcatttaatttctactaagtgtagatactatcgacgttcgtcccggtaatttctactaagtgtagatttttttnnnnnnnnnnaagcttggcgtggatccgatatcaactagatcttgagacaaatggcagtattcatccacaattttaaaagaaaaggggggattggggggtacagtgcaggggaaagaatagtagacataatagcaacagacatacaaactaaag

SEQ ID NO: 19816 - DNA, 301 bp, Artificial Sequence
  Ube2g2.2_NTC.25
  crRNA array
  misc_feature (148)..(157): n is a, c, g, or t
cttggctttatatatcttgtggaaaggacgaaacaccgtaatttctactaagtgtagatgcagcgcagcagctgtcatttaatttctactaagtgtagattcgcgttatcgtgccgtgcgtaatttctactaagtgtagatttttttnnnnnnnnnnaagcttggcgtggatccgatatcaactagatcttgagacaaatggcagtattcatccacaattttaaaagaaaaggggggattggggggtacagtgcaggggaaagaatagtagacataatagcaacagacatacaaactaaag

SEQ ID NO: 19817 - DNA, 301 bp, Artificial Sequence
  Ube2g2.2_NTC.26
  crRNA array
  misc_feature (148)..(157): n is a, c, g, or t
cttggctttatatatcttgtggaaaggacgaaacaccgtaatttctactaagtgtagatgcagcgcagcagctgtcatttaatttctactaagtgtagatcgcgacggcggttttaacactaatttctactaagtgtagatttttttnnnnnnnnnnaagcttggcgtggatccgatatcaactagatcttgagacaaatggcagtattcatccacaattttaaaagaaaaggggggattggggggtacagtgcaggggaaagaatagtagacataatagcaacagacatacaaactaaag

SEQ ID NO: 19818 - DNA, 301 bp, Artificial Sequence
  Ube2g2.2_NTC.27
  crRNA array
  misc_feature (148)..(157): n is a, c, g, or t
cttggctttatatatcttgtggaaaggacgaaacaccgtaatttctactaagtgtagatgcagcgcagcagctgtcatttaatttctactaagtgtagatgtcgcgttgcgaccggcgcttaatttctactaagtgtagatttttttnnnnnnnnnnaagcttggcgtggatccgatatcaactagatcttgagacaaatggcagtattcatccacaattttaaaagaaaaggggggattggggggtacagtgcaggggaaagaatagtagacataatagcaacagacatacaaactaaag

SEQ ID NO: 19819 - DNA, 301 bp, Artificial Sequence
  Ube2g2.2_NTC.28
  crRNA array
  misc_feature (148)..(157): n is a, c, g, or t
cttggctttatatatcttgtggaaaggacgaaacaccgtaatttctactaagtgtagatgcagcgcagcagctgtcatttaatttctactaagtgtagataccgctaatcggcgtaaacttaatttctactaagtgtagatttttttnnnnnnnnnnaagcttggcgtggatccgatatcaactagatcttgagacaaatggcagtattcatccacaattttaaaagaaaaggggggattggggggtacagtgcaggggaaagaatagtagacataatagcaacagacatacaaactaaag

SEQ ID NO: 19820 - DNA, 301 bp, Artificial Sequence
  Ube2g2.2_NTC.29
  crRNA array
  misc_feature (148)..(157): n is a, c, g, or t
cttggctttatatatcttgtggaaaggacgaaacaccgtaatttctactaagtgtagatgcagcgcagcagctgtcatttaatttctactaagtgtagatcgcgatctataccgtctatataatttctactaagtgtagatttttttnnnnnnnnnnaagcttggcgtggatccgatatcaactagatcttgagacaaatggcagtattcatccacaattttaaaagaaaaggggggattggggggtacagtgcaggggaaagaatagtagacataatagcaacagacatacaaactaaag

SEQ ID NO: 19821 - DNA, 301 bp, Artificial Sequence
  Ube2g2.2_NTC.3
  crRNA array
  misc_feature (148)..(157): n is a, c, g, or t
cttggctttatatatcttgtggaaaggacgaaacaccgtaatttctactaagtgtagatgcagcgcagcagctgtcatttaatttctactaagtgtagattcgacgcgagacgacgtacataatttctactaagtgtagatttttttnnnnnnnnnnaagcttggcgtggatccgatatcaactagatcttgagacaaatggcagtattcatccacaattttaaaagaaaaggggggattggggggtacagtgcaggggaaagaatagtagacataatagcaacagacatacaaactaaag

SEQ ID NO: 19822 - DNA, 301 bp, Artificial Sequence
  Ube2g2.2_NTC.30
  crRNA array
  misc_feature (148)..(157): n is a, c, g, or t
cttggctttatatatcttgtggaaaggacgaaacaccgtaatttctactaagtgtagatgcagcgcagcagctgtcatttaatttctactaagtgtagatcgatcgtacgggtgtcctaataatttctactaagtgtagatttttttnnnnnnnnnnaagcttggcgtggatccgatatcaactagatcttgagacaaatggcagtattcatccacaattttaaaagaaaaggggggattggggggtacagtgcaggggaaagaatagtagacataatagcaacagacatacaaactaaag

SEQ ID NO: 19823 - DNA, 301 bp, Artificial Sequence
  Ube2g2.2_NTC.31
  crRNA array
  misc_feature (148)..(157): n is a, c, g, or t
cttggctttatatatcttgtggaaaggacgaaacaccgtaatttctactaagtgtagatgcagcgcagcagctgtcatttaatttctactaagtgtagatgccgaccgcgtgattgtaggtaatttctactaagtgtagatttttttnnnnnnnnnnaagcttggcgtggatccgatatcaactagatcttgagacaaatggcagtattcatccacaattttaaaagaaaaggggggattggggggtacagtgcaggggaaagaatagtagacataatagcaacagacatacaaactaaag

SEQ ID NO: 19824 - DNA, 301 bp, Artificial Sequence
  Ube2g2.2_NTC.32
  crRNA array
  misc_feature (148)..(157): n is a, c, g, or t
cttggctttatatatcttgtggaaaggacgaaacaccgtaatttctactaagtgtagatgcagcgcagcagctgtcatttaatttctactaagtgtagatgcacgttacgcccgggtcactaatttctactaagtgtagatttttttnnnnnnnnnnaagcttggcgtggatccgatatcaactagatcttgagacaaatggcagtattcatccacaattttaaaagaaaaggggggattggggggtacagtgcaggggaaagaatagtagacataatagcaacagacatacaaactaaag

SEQ ID NO: 19825 - DNA, 301 bp, Artificial Sequence
  Ube2g2.2_NTC.33
  crRNA array
  misc_feature (148)..(157): n is a, c, g, or t
cttggctttatatatcttgtggaaaggacgaaacaccgtaatttctactaagtgtagatgcagcgcagcagctgtcatttaatttctactaagtgtagattaagcgaccgacgcattcgctaatttctactaagtgtagatttttttnnnnnnnnnnaagcttggcgtggatccgatatcaactagatcttgagacaaatggcagtattcatccacaattttaaaagaaaaggggggattggggggtacagtgcaggggaaagaatagtagacataatagcaacagacatacaaactaaag

SEQ ID NO: 19826 - DNA, 301 bp, Artificial Sequence
  Ube2g2.2_NTC.34
  crRNA array
  misc_feature (148)..(157): n is a, c, g, or t
cttggctttatatatcttgtggaaaggacgaaacaccgtaatttctactaagtgtagatgcagcgcagcagctgtcatttaatttctactaagtgtagattagcgttcgacacgtgaaactaatttctactaagtgtagatttttttnnnnnnnnnnaagcttggcgtggatccgatatcaactagatcttgagacaaatggcagtattcatccacaattttaaaagaaaaggggggattggggggtacagtgcaggggaaagaatagtagacataatagcaacagacatacaaactaaag

SEQ ID NO: 19827 - DNA, 301 bp, Artificial Sequence
  Ube2g2.2_NTC.35
  crRNA array
  misc_feature (148)..(157): n is a, c, g, or t
cttggctttatatatcttgtggaaaggacgaaacaccgtaatttctactaagtgtagatgcagcgcagcagctgtcatttaatttctactaagtgtagattggcgcgtaatcgctattcgtaatttctactaagtgtagatttttttnnnnnnnnnnaagcttggcgtggatccgatatcaactagatcttgagacaaatggcagtattcatccacaattttaaaagaaaaggggggattggggggtacagtgcaggggaaagaatagtagacataatagcaacagacatacaaactaaag

SEQ ID NO: 19828 - DNA, 301 bp, Artificial Sequence
  Ube2g2.2_NTC.36
  crRNA array
  misc_feature (148)..(157): n is a, c, g, or t
cttggctttatatatcttgtggaaaggacgaaacaccgtaatttctactaagtgtagatgcagcgcagcagctgtcatttaatttctactaagtgtagatcaacccgccgtagcgggccttaatttctactaagtgtagatttttttnnnnnnnnnnaagcttggcgtggatccgatatcaactagatcttgagacaaatggcagtattcatccacaattttaaaagaaaaggggggattggggggtacagtgcaggggaaagaatagtagacataatagcaacagacatacaaactaaag

SEQ ID NO: 19829 - DNA, 301 bp, Artificial Sequence
  Ube2g2.2_NTC.37
  crRNA array
  misc_feature (148)..(157): n is a, c, g, or t
cttggctttatatatcttgtggaaaggacgaaacaccgtaatttctactaagtgtagatgcagcgcagcagctgtcatttaatttctactaagtgtagattttgcgttgacgcgattacttaatttctactaagtgtagatttttttnnnnnnnnnnaagcttggcgtggatccgatatcaactagatcttgagacaaatggcagtattcatccacaattttaaaagaaaaggggggattggggggtacagtgcaggggaaagaatagtagacataatagcaacagacatacaaactaaag

SEQ ID NO: 19830 - DNA, 301 bp, Artificial Sequence
  Ube2g2.2_NTC.38
  crRNA array
  misc_feature (148)..(157): n is a, c, g, or t
cttggctttatatatcttgtggaaaggacgaaacaccgtaatttctactaagtgtagatgcagcgcagcagctgtcatttaatttctactaagtgtagataacggagcgcgatactaccataatttctactaagtgtagatttttttnnnnnnnnnnaagcttggcgtggatccgatatcaactagatcttgagacaaatggcagtattcatccacaattttaaaagaaaaggggggattggggggtacagtgcaggggaaagaatagtagacataatagcaacagacatacaaactaaag

SEQ ID NO: 19831 - DNA, 301 bp, Artificial Sequence
  Ube2g2.2_NTC.39
  crRNA array
  misc_feature (148)..(157): n is a, c, g, or t
cttggctttatatatcttgtggaaaggacgaaacaccgtaatttctactaagtgtagatgcagcgcagcagctgtcatttaatttctactaagtgtagatccggacgttataacgtttcttaatttctactaagtgtagatttttttnnnnnnnnnnaagcttggcgtggatccgatatcaactagatcttgagacaaatggcagtattcatccacaattttaaaagaaaaggggggattggggggtacagtgcaggggaaagaatagtagacataatagcaacagacatacaaactaaag

SEQ ID NO: 19832 - DNA, 301 bp, Artificial Sequence
  Ube2g2.2_NTC.4
  crRNA array
  misc_feature (148)..(157): n is a, c, g, or t
cttggctttatatatcttgtggaaaggacgaaacaccgtaatttctactaagtgtagatgcagcgcagcagctgtcatttaatttctactaagtgtagatatacccgtcgcgaacgtgagtaatttctactaagtgtagatttttttnnnnnnnnnnaagcttggcgtggatccgatatcaactagatcttgagacaaatggcagtattcatccacaattttaaaagaaaaggggggattggggggtacagtgcaggggaaagaatagtagacataatagcaacagacatacaaactaaag

SEQ ID NO: 19833 - DNA, 301 bp, Artificial Sequence
  Ube2g2.2_NTC.40
  crRNA array
  misc_feature (148)..(157): n is a, c, g, or t
cttggctttatatatcttgtggaaaggacgaaacaccgtaatttctactaagtgtagatgcagcgcagcagctgtcatttaatttctactaagtgtagatattcgcgaacccggccggaataatttctactaagtgtagatttttttnnnnnnnnnnaagcttggcgtggatccgatatcaactagatcttgagacaaatggcagtattcatccacaattttaaaagaaaaggggggattggggggtacagtgcaggggaaagaatagtagacataatagcaacagacatacaaactaaag

SEQ ID NO: 19834 - DNA, 301 bp, Artificial Sequence
  Ube2g2.2_NTC.41
  crRNA array
  misc_feature (148)..(157): n is a, c, g, or t
cttggctttatatatcttgtggaaaggacgaaacaccgtaatttctactaagtgtagatgcagcgcagcagctgtcatttaatttctactaagtgtagatttgatggcgcgacgcgttattaatttctactaagtgtagatttttttnnnnnnnnnnaagcttggcgtggatccgatatcaactagatcttgagacaaatggcagtattcatccacaattttaaaagaaaaggggggattggggggtacagtgcaggggaaagaatagtagacataatagcaacagacatacaaactaaag

SEQ ID NO: 19835 - DNA, 301 bp, Artificial Sequence
  Ube2g2.2_NTC.42
  crRNA array
  misc_feature (148)..(157): n is a, c, g, or t
cttggctttatatatcttgtggaaaggacgaaacaccgtaatttctactaagtgtagatgcagcgcagcagctgtcatttaatttctactaagtgtagatggtcaaatcgcggcgataactaatttctactaagtgtagatttttttnnnnnnnnnnaagcttggcgtggatccgatatcaactagatcttgagacaaatggcagtattcatccacaattttaaaagaaaaggggggattggggggtacagtgcaggggaaagaatagtagacataatagcaacagacatacaaactaaag

SEQ ID NO: 19836 - DNA, 301 bp, Artificial Sequence
  Ube2g2.2_NTC.43
  crRNA array
  misc_feature (148)..(157): n is a, c, g, or t
cttggctttatatatcttgtggaaaggacgaaacaccgtaatttctactaagtgtagatgcagcgcagcagctgtcatttaatttctactaagtgtagatcgactcgcgcattgaactggtaatttctactaagtgtagatttttttnnnnnnnnnnaagcttggcgtggatccgatatcaactagatcttgagacaaatggcagtattcatccacaattttaaaagaaaaggggggattggggggtacagtgcaggggaaagaatagtagacataatagcaacagacatacaaactaaag

SEQ ID NO: 19837 - DNA, 301 bp, Artificial Sequence
  Ube2g2.2_NTC.44
  crRNA array
  misc_feature (148)..(157): n is a, c, g, or t
cttggctttatatatcttgtggaaaggacgaaacaccgtaatttctactaagtgtagatgcagcgcagcagctgtcatttaatttctactaagtgtagatagcgtcgtacgatttatcgttaatttctactaagtgtagatttttttnnnnnnnnnnaagcttggcgtggatccgatatcaactagatcttgagacaaatggcagtattcatccacaattttaaaagaaaaggggggattggggggtacagtgcaggggaaagaatagtagacataatagcaacagacatacaaactaaag

SEQ ID NO: 19838 - DNA, 301 bp, Artificial Sequence
  Ube2g2.2_NTC.45
  crRNA array
  misc_feature (148)..(157): n is a, c, g, or t
cttggctttatatatcttgtggaaaggacgaaacaccgtaatttctactaagtgtagatgcagcgcagcagctgtcatttaatttctactaagtgtagatcggaacgcgtgatactagggtaatttctactaagtgtagatttttttnnnnnnnnnnaagcttggcgtggatccgatatcaactagatcttgagacaaatggcagtattcatccacaattttaaaagaaaaggggggattggggggtacagtgcaggggaaagaatagtagacataatagcaacagacatacaaactaaag

SEQ ID NO: 19839 - DNA, 301 bp, Artificial Sequence
  Ube2g2.2_NTC.46
  crRNA array
  misc_feature (148)..(157): n is a, c, g, or t
cttggctttatatatcttgtggaaaggacgaaacaccgtaatttctactaagtgtagatgcagcgcagcagctgtcatttaatttctactaagtgtagatagcgggtcgtagacgcgcggtaatttctactaagtgtagatttttttnnnnnnnnnnaagcttggcgtggatccgatatcaactagatcttgagacaaatggcagtattcatccacaattttaaaagaaaaggggggattggggggtacagtgcaggggaaagaatagtagacataatagcaacagacatacaaactaaag

SEQ ID NO: 19840 - DNA, 301 bp, Artificial Sequence
  Ube2g2.2_NTC.47
  crRNA array
  misc_feature (148)..(157): n is a, c, g, or t
cttggctttatatatcttgtggaaaggacgaaacaccgtaatttctactaagtgtagatgcagcgcagcagctgtcatttaatttctactaagtgtagattctcgtatcgcgattgttaataatttctactaagtgtagatttttttnnnnnnnnnnaagcttggcgtggatccgatatcaactagatcttgagacaaatggcagtattcatccacaattttaaaagaaaaggggggattggggggtacagtgcaggggaaagaatagtagacataatagcaacagacatacaaactaaag

SEQ ID NO: 19841 - DNA, 301 bp, Artificial Sequence
  Ube2g2.2_NTC.48
  crRNA array
  misc_feature (148)..(157): n is a, c, g, or t
cttggctttatatatcttgtggaaaggacgaaacaccgtaatttctactaagtgtagatgcagcgcagcagctgtcatttaatttctactaagtgtagatcggtcgactacggctgttagtaatttctactaagtgtagatttttttnnnnnnnnnnaagcttggcgtggatccgatatcaactagatcttgagacaaatggcagtattcatccacaattttaaaagaaaaggggggattggggggtacagtgcaggggaaagaatagtagacataatagcaacagacatacaaactaaag

SEQ ID NO: 19842 - DNA, 301 bp, Artificial Sequence
  Ube2g2.2_NTC.49
  crRNA array
  misc_feature (148)..(157): n is a, c, g, or t
cttggctttatatatcttgtggaaaggacgaaacaccgtaatttctactaagtgtagatgcagcgcagcagctgtcatttaatttctactaagtgtagattcggggcgcgtcaactgaattaatttctactaagtgtagatttttttnnnnnnnnnnaagcttggcgtggatccgatatcaactagatcttgagacaaatggcagtattcatccacaattttaaaagaaaaggggggattggggggtacagtgcaggggaaagaatagtagacataatagcaacagacatacaaactaaag

SEQ ID NO: 19843 - DNA, 301 bp, Artificial Sequence
  Ube2g2.2_NTC.5
  crRNA array
  misc_feature (148)..(157): n is a, c, g, or t
cttggctttatatatcttgtggaaaggacgaaacaccgtaatttctactaagtgtagatgcagcgcagcagctgtcatttaatttctactaagtgtagatgcttacgcgtcgcgaatgtataatttctactaagtgtagatttttttnnnnnnnnnnaagcttggcgtggatccgatatcaactagatcttgagacaaatggcagtattcatccacaattttaaaagaaaaggggggattggggggtacagtgcaggggaaagaatagtagacataatagcaacagacatacaaactaaag

SEQ ID NO: 19844 - DNA, 301 bp, Artificial Sequence
  Ube2g2.2_NTC.50
  crRNA array
  misc_feature (148)..(157): n is a, c, g, or t
cttggctttatatatcttgtggaaaggacgaaacaccgtaatttctactaagtgtagatgcagcgcagcagctgtcatttaatttctactaagtgtagatattgccgctcgcgcaaaatctaatttctactaagtgtagatttttttnnnnnnnnnnaagcttggcgtggatccgatatcaactagatcttgagacaaatggcagtattcatccacaattttaaaagaaaaggggggattggggggtacagtgcaggggaaagaatagtagacataatagcaacagacatacaaactaaag

SEQ ID NO: 19845 - DNA, 301 bp, Artificial Sequence
  Ube2g2.2_NTC.51
  crRNA array
  misc_feature (148)..(157): n is a, c, g, or t
cttggctttatatatcttgtggaaaggacgaaacaccgtaatttctactaagtgtagatgcagcgcagcagctgtcatttaatttctactaagtgtagattaacgcgcaacacgccaatgtaatttctactaagtgtagatttttttnnnnnnnnnnaagcttggcgtggatccgatatcaactagatcttgagacaaatggcagtattcatccacaattttaaaagaaaaggggggattggggggtacagtgcaggggaaagaatagtagacataatagcaacagacatacaaactaaag

SEQ ID NO: 19846 - DNA, 301 bp, Artificial Sequence
  Ube2g2.2_NTC.6
  crRNA array
  misc_feature (148)..(157): n is a, c, g, or t
cttggctttatatatcttgtggaaaggacgaaacaccgtaatttctactaagtgtagatgcagcgcagcagctgtcatttaatttctactaagtgtagatcgaatcgcgcctacgggaattaatttctactaagtgtagatttttttnnnnnnnnnnaagcttggcgtggatccgatatcaactagatcttgagacaaatggcagtattcatccacaattttaaaagaaaaggggggattggggggtacagtgcaggggaaagaatagtagacataatagcaacagacatacaaactaaag

SEQ ID NO: 19847 - DNA, 301 bp, Artificial Sequence
  Ube2g2.2_NTC.7
  crRNA array
  misc_feature (148)..(157): n is a, c, g, or t
cttggctttatatatcttgtggaaaggacgaaacaccgtaatttctactaagtgtagatgcagcgcagcagctgtcatttaatttctactaagtgtagatcgccgaacggataagactattaatttctactaagtgtagatttttttnnnnnnnnnnaagcttggcgtggatccgatatcaactagatcttgagacaaatggcagtattcatccacaattttaaaagaaaaggggggattggggggtacagtgcaggggaaagaatagtagacataatagcaacagacatacaaactaaag

SEQ ID NO: 19848 - DNA, 301 bp, Artificial Sequence
  Ube2g2.2_NTC.8
  crRNA array
  misc_feature (148)..(157): n is a, c, g, or t
cttggctttatatatcttgtggaaaggacgaaacaccgtaatttctactaagtgtagatgcagcgcagcagctgtcatttaatttctactaagtgtagatcgaccgaggttacgctgggataatttctactaagtgtagatttttttnnnnnnnnnnaagcttggcgtggatccgatatcaactagatcttgagacaaatggcagtattcatccacaattttaaaagaaaaggggggattggggggtacagtgcaggggaaagaatagtagacataatagcaacagacatacaaactaaag

SEQ ID NO: 19849 - DNA, 301 bp, Artificial Sequence
  Ube2g2.2_NTC.9
  crRNA array
  misc_feature (148)..(157): n is a, c, g, or t
cttggctttatatatcttgtggaaaggacgaaacaccgtaatttctactaagtgtagatgcagcgcagcagctgtcatttaatttctactaagtgtagatatcgccgtacggctatggcataatttctactaagtgtagatttttttnnnnnnnnnnaagcttggcgtggatccgatatcaactagatcttgagacaaatggcagtattcatccacaattttaaaagaaaaggggggattggggggtacagtgcaggggaaagaatagtagacataatagcaacagacatacaaactaaag

SEQ ID NO: 19850 - DNA, 301 bp, Artificial Sequence
  Ube2g2.3_NTC.0
  crRNA array
  misc_feature (148)..(157): n is a, c, g, or t
cttggctttatatatcttgtggaaaggacgaaacaccgtaatttctactaagtgtagataaacgcaacagagtctggtgtaatttctactaagtgtagattatagcgtcgcgcgctaatttaatttctactaagtgtagatttttttnnnnnnnnnnaagcttggcgtggatccgatatcaactagatcttgagacaaatggcagtattcatccacaattttaaaagaaaaggggggattggggggtacagtgcaggggaaagaatagtagacataatagcaacagacatacaaactaaag

SEQ ID NO: 19851 - DNA, 301 bp, Artificial Sequence
  Ube2g2.3_NTC.1
  crRNA array
  misc_feature (148)..(157): n is a, c, g, or t
cttggctttatatatcttgtggaaaggacgaaacaccgtaatttctactaagtgtagataaacgcaacagagtctggtgtaatttctactaagtgtagatcgcgtaaccgttccggctcctaatttctactaagtgtagatttttttnnnnnnnnnnaagcttggcgtggatccgatatcaactagatcttgagacaaatggcagtattcatccacaattttaaaagaaaaggggggattggggggtacagtgcaggggaaagaatagtagacataatagcaacagacatacaaactaaag

SEQ ID NO: 19852 - DNA, 301 bp, Artificial Sequence
  Ube2g2.3_NTC.10
  crRNA array
  misc_feature (148)..(157): n is a, c, g, or t
cttggctttatatatcttgtggaaaggacgaaacaccgtaatttctactaagtgtagataaacgcaacagagtctggtgtaatttctactaagtgtagatcgctaagttcgcgcgggccgtaatttctactaagtgtagatttttttnnnnnnnnnnaagcttggcgtggatccgatatcaactagatcttgagacaaatggcagtattcatccacaattttaaaagaaaaggggggattggggggtacagtgcaggggaaagaatagtagacataatagcaacagacatacaaactaaag

SEQ ID NO: 19853 - DNA, 301 bp, Artificial Sequence
  Ube2g2.3_NTC.11
  crRNA array
  misc_feature (148)..(157): n is a, c, g, or t
cttggctttatatatcttgtggaaaggacgaaacaccgtaatttctactaagtgtagataaacgcaacagagtctggtgtaatttctactaagtgtagatcgttcgtcgacgaagcaatctaatttctactaagtgtagatttttttnnnnnnnnnnaagcttggcgtggatccgatatcaactagatcttgagacaaatggcagtattcatccacaattttaaaagaaaaggggggattggggggtacagtgcaggggaaagaatagtagacataatagcaacagacatacaaactaaag

SEQ ID NO: 19854 - DNA, 301 bp, Artificial Sequence
  Ube2g2.3_NTC.12
  crRNA array
  misc_feature (148)..(157): n is a, c, g, or t
cttggctttatatatcttgtggaaaggacgaaacaccgtaatttctactaagtgtagataaacgcaacagagtctggtgtaatttctactaagtgtagatcgccgacgattaatcaatagtaatttctactaagtgtagatttttttnnnnnnnnnnaagcttggcgtggatccgatatcaactagatcttgagacaaatggcagtattcatccacaattttaaaagaaaaggggggattggggggtacagtgcaggggaaagaatagtagacataatagcaacagacatacaaactaaag

SEQ ID NO: 19855 - DNA, 301 bp, Artificial Sequence
  Ube2g2.3_NTC.13
  crRNA array
  misc_feature (148)..(157): n is a, c, g, or t
cttggctttatatatcttgtggaaaggacgaaacaccgtaatttctactaagtgtagataaacgcaacagagtctggtgtaatttctactaagtgtagatgaccgttgtatcgcgatcaataatttctactaagtgtagatttttttnnnnnnnnnnaagcttggcgtggatccgatatcaactagatcttgagacaaatggcagtattcatccacaattttaaaagaaaaggggggattggggggtacagtgcaggggaaagaatagtagacataatagcaacagacatacaaactaaag

SEQ ID NO: 19856 - DNA, 301 bp, Artificial Sequence
  Ube2g2.3_NTC.14
  crRNA array
  misc_feature (148)..(157): n is a, c, g, or t
cttggctttatatatcttgtggaaaggacgaaacaccgtaatttctactaagtgtagataaacgcaacagagtctggtgtaatttctactaagtgtagatccgttcgtgcgatagtgttttaatttctactaagtgtagatttttttnnnnnnnnnnaagcttggcgtggatccgatatcaactagatcttgagacaaatggcagtattcatccacaattttaaaagaaaaggggggattggggggtacagtgcaggggaaagaatagtagacataatagcaacagacatacaaactaaag

SEQ ID NO: 19857 - DNA, 301 bp, Artificial Sequence
  Ube2g2.3_NTC.15
  crRNA array
  misc_feature (148)..(157): n is a, c, g, or t
cttggctttatatatcttgtggaaaggacgaaacaccgtaatttctactaagtgtagataaacgcaacagagtctggtgtaatttctactaagtgtagatgttgtcgtgccgcgaatttataatttctactaagtgtagatttttttnnnnnnnnnnaagcttggcgtggatccgatatcaactagatcttgagacaaatggcagtattcatccacaattttaaaagaaaaggggggattggggggtacagtgcaggggaaagaatagtagacataatagcaacagacatacaaactaaag

SEQ ID NO: 19858 - DNA, 301 bp, Artificial Sequence
  Ube2g2.3_NTC.16
  crRNA array
  misc_feature (148)..(157): n is a, c, g, or t
cttggctttatatatcttgtggaaaggacgaaacaccgtaatttctactaagtgtagataaacgcaacagagtctggtgtaatttctactaagtgtagatcggtacgttagacgaaaatttaatttctactaagtgtagatttttttnnnnnnnnnnaagcttggcgtggatccgatatcaactagatcttgagacaaatggcagtattcatccacaattttaaaagaaaaggggggattggggggtacagtgcaggggaaagaatagtagacataatagcaacagacatacaaactaaag

SEQ ID NO: 19859 - DNA, 301 bp, Artificial Sequence
  Ube2g2.3_NTC.17
  crRNA array
  misc_feature (148)..(157): n is a, c, g, or t
cttggctttatatatcttgtggaaaggacgaaacaccgtaatttctactaagtgtagataaacgcaacagagtctggtgtaatttctactaagtgtagattatcgaacgctatcgaacgttaatttctactaagtgtagatttttttnnnnnnnnnnaagcttggcgtggatccgatatcaactagatcttgagacaaatggcagtattcatccacaattttaaaagaaaaggggggattggggggtacagtgcaggggaaagaatagtagacataatagcaacagacatacaaactaaag

SEQ ID NO: 19860 - DNA, 301 bp, Artificial Sequence
  Ube2g2.3_NTC.18
  crRNA array
  misc_feature (148)..(157): n is a, c, g, or t
cttggctttatatatcttgtggaaaggacgaaacaccgtaatttctactaagtgtagataaacgcaacagagtctggtgtaatttctactaagtgtagattccggttacgaccggcaaaataatttctactaagtgtagatttttttnnnnnnnnnnaagcttggcgtggatccgatatcaactagatcttgagacaaatggcagtattcatccacaattttaaaagaaaaggggggattggggggtacagtgcaggggaaagaatagtagacataatagcaacagacatacaaactaaag

SEQ ID NO: 19861 - DNA, 301 bp, Artificial Sequence
  Ube2g2.3_NTC.19
  crRNA array
  misc_feature (148)..(157): n is a, c, g, or t
cttggctttatatatcttgtggaaaggacgaaacaccgtaatttctactaagtgtagataaacgcaacagagtctggtgtaatttctactaagtgtagatcgtcgtagaacgatacccgataatttctactaagtgtagatttttttnnnnnnnnnnaagcttggcgtggatccgatatcaactagatcttgagacaaatggcagtattcatccacaattttaaaagaaaaggggggattggggggtacagtgcaggggaaagaatagtagacataatagcaacagacatacaaactaaag

SEQ ID NO: 19862 - DNA, 301 bp, Artificial Sequence
  Ube2g2.3_NTC.2
  crRNA array
  misc_feature (148)..(157): n is a, c, g, or t
cttggctttatatatcttgtggaaaggacgaaacaccgtaatttctactaagtgtagataaacgcaacagagtctggtgtaatttctactaagtgtagatttatgtcgcgccgcgacccgtaatttctactaagtgtagatttttttnnnnnnnnnnaagcttggcgtggatccgatatcaactagatcttgagacaaatggcagtattcatccacaattttaaaagaaaaggggggattggggggtacagtgcaggggaaagaatagtagacataatagcaacagacatacaaactaaag

SEQ ID NO: 19863 - DNA, 301 bp, Artificial Sequence
  Ube2g2.3_NTC.20
  crRNA array
  misc_feature (148)..(157): n is a, c, g, or t
cttggctttatatatcttgtggaaaggacgaaacaccgtaatttctactaagtgtagataaacgcaacagagtctggtgtaatttctactaagtgtagatattccggcgcgaccagaagataatttctactaagtgtagatttttttnnnnnnnnnnaagcttggcgtggatccgatatcaactagatcttgagacaaatggcagtattcatccacaattttaaaagaaaaggggggattggggggtacagtgcaggggaaagaatagtagacataatagcaacagacatacaaactaaag

SEQ ID NO: 19864 - DNA, 301 bp, Artificial Sequence
  Ube2g2.3_NTC.21
  crRNA array
  misc_feature (148)..(157): n is a, c, g, or t
cttggctttatatatcttgtggaaaggacgaaacaccgtaatttctactaagtgtagataaacgcaacagagtctggtgtaatttctactaagtgtagatgtataacttcgcgcggtccgtaatttctactaagtgtagatttttttnnnnnnnnnnaagcttggcgtggatccgatatcaactagatcttgagacaaatggcagtattcatccacaattttaaaagaaaaggggggattggggggtacagtgcaggggaaagaatagtagacataatagcaacagacatacaaactaaag

SEQ ID NO: 19865 - DNA, 301 bp, Artificial Sequence
  Ube2g2.3_NTC.22
  crRNA array
  misc_feature (148)..(157): n is a, c, g, or t
cttggctttatatatcttgtggaaaggacgaaacaccgtaatttctactaagtgtagataaacgcaacagagtctggtgtaatttctactaagtgtagatgcgcgtcaacgtaatgtgcctaatttctactaagtgtagatttttttnnnnnnnnnnaagcttggcgtggatccgatatcaactagatcttgagacaaatggcagtattcatccacaattttaaaagaaaaggggggattggggggtacagtgcaggggaaagaatagtagacataatagcaacagacatacaaactaaag

SEQ ID NO: 19866 - DNA, 301 bp, Artificial Sequence
  Ube2g2.3_NTC.23
  crRNA array
  misc_feature (148)..(157): n is a, c, g, or t
cttggctttatatatcttgtggaaaggacgaaacaccgtaatttctactaagtgtagataaacgcaacagagtctggtgtaatttctactaagtgtagatacgcgctattatcgtaggtgtaatttctactaagtgtagatttttttnnnnnnnnnnaagcttggcgtggatccgatatcaactagatcttgagacaaatggcagtattcatccacaattttaaaagaaaaggggggattggggggtacagtgcaggggaaagaatagtagacataatagcaacagacatacaaactaaag

SEQ ID NO: 19867 - DNA, 301 bp, Artificial Sequence
  Ube2g2.3_NTC.24
  crRNA array
  misc_feature (148)..(157): n is a, c, g, or t
cttggctttatatatcttgtggaaaggacgaaacaccgtaatttctactaagtgtagataaacgcaacagagtctggtgtaatttctactaagtgtagatactatcgacgttcgtcccggtaatttctactaagtgtagatttttttnnnnnnnnnnaagcttggcgtggatccgatatcaactagatcttgagacaaatggcagtattcatccacaattttaaaagaaaaggggggattggggggtacagtgcaggggaaagaatagtagacataatagcaacagacatacaaactaaag

SEQ ID NO: 19868 - DNA, 301 bp, Artificial Sequence
  Ube2g2.3_NTC.25
  crRNA array
  misc_feature (148)..(157): n is a, c, g, or t
cttggctttatatatcttgtggaaaggacgaaacaccgtaatttctactaagtgtagataaacgcaacagagtctggtgtaatttctactaagtgtagattcgcgttatcgtgccgtgcgtaatttctactaagtgtagatttttttnnnnnnnnnnaagcttggcgtggatccgatatcaactagatcttgagacaaatggcagtattcatccacaattttaaaagaaaaggggggattggggggtacagtgcaggggaaagaatagtagacataatagcaacagacatacaaactaaag

SEQ ID NO: 19869 - DNA, 301 bp, Artificial Sequence
  Ube2g2.3_NTC.26
  crRNA array
  misc_feature (148)..(157): n is a, c, g, or t
cttggctttatatatcttgtggaaaggacgaaacaccgtaatttctactaagtgtagataaacgcaacagagtctggtgtaatttctactaagtgtagatcgcgacggcggttttaacactaatttctactaagtgtagatttttttnnnnnnnnnnaagcttggcgtggatccgatatcaactagatcttgagacaaatggcagtattcatccacaattttaaaagaaaaggggggattggggggtacagtgcaggggaaagaatagtagacataatagcaacagacatacaaactaaag

SEQ ID NO: 19870 - DNA, 301 bp, Artificial Sequence
  Ube2g2.3_NTC.27
  crRNA array
  misc_feature (148)..(157): n is a, c, g, or t
cttggctttatatatcttgtggaaaggacgaaacaccgtaatttctactaagtgtagataaacgcaacagagtctggtgtaatttctactaagtgtagatgtcgcgttgcgaccggcgcttaatttctactaagtgtagatttttttnnnnnnnnnnaagcttggcgtggatccgatatcaactagatcttgagacaaatggcagtattcatccacaattttaaaagaaaaggggggattggggggtacagtgcaggggaaagaatagtagacataatagcaacagacatacaaactaaag

SEQ ID NO: 19871 - DNA, 301 bp, Artificial Sequence
  Ube2g2.3_NTC.28
  crRNA array
  misc_feature (148)..(157): n is a, c, g, or t
cttggctttatatatcttgtggaaaggacgaaacaccgtaatttctactaagtgtagataaacgcaacagagtctggtgtaatttctactaagtgtagataccgctaatcggcgtaaacttaatttctactaagtgtagatttttttnnnnnnnnnnaagcttggcgtggatccgatatcaactagatcttgagacaaatggcagtattcatccacaattttaaaagaaaaggggggattggggggtacagtgcaggggaaagaatagtagacataatagcaacagacatacaaactaaag

SEQ ID NO: 19872 - DNA, 301 bp, Artificial Sequence
  Ube2g2.3_NTC.29
  crRNA array
  misc_feature (148)..(157): n is a, c, g, or t
cttggctttatatatcttgtggaaaggacgaaacaccgtaatttctactaagtgtagataaacgcaacagagtctggtgtaatttctactaagtgtagatcgcgatctataccgtctatataatttctactaagtgtagatttttttnnnnnnnnnnaagcttggcgtggatccgatatcaactagatcttgagacaaatggcagtattcatccacaattttaaaagaaaaggggggattggggggtacagtgcaggggaaagaatagtagacataatagcaacagacatacaaactaaag

SEQ ID NO: 19873 - DNA, 301 bp, Artificial Sequence
  Ube2g2.3_NTC.3
  crRNA array
  misc_feature (148)..(157): n is a, c, g, or t
cttggctttatatatcttgtggaaaggacgaaacaccgtaatttctactaagtgtagataaacgcaacagagtctggtgtaatttctactaagtgtagattcgacgcgagacgacgtacataatttctactaagtgtagatttttttnnnnnnnnnnaagcttggcgtggatccgatatcaactagatcttgagacaaatggcagtattcatccacaattttaaaagaaaaggggggattggggggtacagtgcaggggaaagaatagtagacataatagcaacagacatacaaactaaag

SEQ ID NO: 19874 - DNA, 301 bp, Artificial Sequence
  Ube2g2.3_NTC.30
  crRNA array
  misc_feature (148)..(157): n is a, c, g, or t
cttggctttatatatcttgtggaaaggacgaaacaccgtaatttctactaagtgtagataaacgcaacagagtctggtgtaatttctactaagtgtagatcgatcgtacgggtgtcctaataatttctactaagtgtagatttttttnnnnnnnnnnaagcttggcgtggatccgatatcaactagatcttgagacaaatggcagtattcatccacaattttaaaagaaaaggggggattggggggtacagtgcaggggaaagaatagtagacataatagcaacagacatacaaactaaag

SEQ ID NO: 19875 - DNA, 301 bp, Artificial Sequence
  Ube2g2.3_NTC.31
  crRNA array
  misc_feature (148)..(157): n is a, c, g, or t
cttggctttatatatcttgtggaaaggacgaaacaccgtaatttctactaagtgtagataaacgcaacagagtctggtgtaatttctactaagtgtagatgccgaccgcgtgattgtaggtaatttctactaagtgtagatttttttnnnnnnnnnnaagcttggcgtggatccgatatcaactagatcttgagacaaatggcagtattcatccacaattttaaaagaaaaggggggattggggggtacagtgcaggggaaagaatagtagacataatagcaacagacatacaaactaaag

SEQ ID NO: 19876 - DNA, 301 bp, Artificial Sequence
  Ube2g2.3_NTC.32
  crRNA array
  misc_feature (148)..(157): n is a, c, g, or t
cttggctttatatatcttgtggaaaggacgaaacaccgtaatttctactaagtgtagataaacgcaacagagtctggtgtaatttctactaagtgtagatgcacgttacgcccgggtcactaatttctactaagtgtagatttttttnnnnnnnnnnaagcttggcgtggatccgatatcaactagatcttgagacaaatggcagtattcatccacaattttaaaagaaaaggggggattggggggtacagtgcaggggaaagaatagtagacataatagcaacagacatacaaactaaag

SEQ ID NO: 19877 - DNA, 301 bp, Artificial Sequence
  Ube2g2.3_NTC.33
  crRNA array
  misc_feature (148)..(157): n is a, c, g, or t
cttggctttatatatcttgtggaaaggacgaaacaccgtaatttctactaagtgtagataaacgcaacagagtctggtgtaatttctactaagtgtagattaagcgaccgacgcattcgctaatttctactaagtgtagatttttttnnnnnnnnnnaagcttggcgtggatccgatatcaactagatcttgagacaaatggcagtattcatccacaattttaaaagaaaaggggggattggggggtacagtgcaggggaaagaatagtagacataatagcaacagacatacaaactaaag

SEQ ID NO: 19878 - DNA, 301 bp, Artificial Sequence
  Ube2g2.3_NTC.34
  crRNA array
  misc_feature (148)..(157): n is a, c, g, or t
cttggctttatatatcttgtggaaaggacgaaacaccgtaatttctactaagtgtagataaacgcaacagagtctggtgtaatttctactaagtgtagattagcgttcgacacgtgaaactaatttctactaagtgtagatttttttnnnnnnnnnnaagcttggcgtggatccgatatcaactagatcttgagacaaatggcagtattcatccacaattttaaaagaaaaggggggattggggggtacagtgcaggggaaagaatagtagacataatagcaacagacatacaaactaaag

SEQ ID NO: 19879 - DNA, 301 bp, Artificial Sequence
  Ube2g2.3_NTC.35
  crRNA array
  misc_feature (148)..(157): n is a, c, g, or t
cttggctttatatatcttgtggaaaggacgaaacaccgtaatttctactaagtgtagataaacgcaacagagtctggtgtaatttctactaagtgtagattggcgcgtaatcgctattcgtaatttctactaagtgtagatttttttnnnnnnnnnnaagcttggcgtggatccgatatcaactagatcttgagacaaatggcagtattcatccacaattttaaaagaaaaggggggattggggggtacagtgcaggggaaagaatagtagacataatagcaacagacatacaaactaaag

SEQ ID NO: 19880 - DNA, 301 bp, Artificial Sequence
  Ube2g2.3_NTC.36
  crRNA array
  misc_feature (148)..(157): n is a, c, g, or t
cttggctttatatatcttgtggaaaggacgaaacaccgtaatttctactaagtgtagataaacgcaacagagtctggtgtaatttctactaagtgtagatcaacccgccgtagcgggccttaatttctactaagtgtagatttttttnnnnnnnnnnaagcttggcgtggatccgatatcaactagatcttgagacaaatggcagtattcatccacaattttaaaagaaaaggggggattggggggtacagtgcaggggaaagaatagtagacataatagcaacagacatacaaactaaag

SEQ ID NO: 19881 - DNA, 301 bp, Artificial Sequence
  Ube2g2.3_NTC.37
  crRNA array
  misc_feature (148)..(157): n is a, c, g, or t
cttggctttatatatcttgtggaaaggacgaaacaccgtaatttctactaagtgtagataaacgcaacagagtctggtgtaatttctactaagtgtagattttgcgttgacgcgattacttaatttctactaagtgtagatttttttnnnnnnnnnnaagcttggcgtggatccgatatcaactagatcttgagacaaatggcagtattcatccacaattttaaaagaaaaggggggattggggggtacagtgcaggggaaagaatagtagacataatagcaacagacatacaaactaaag

SEQ ID NO: 19882 - DNA, 301 bp, Artificial Sequence
  Ube2g2.3_NTC.38
  crRNA array
  misc_feature (148)..(157): n is a, c, g, or t
cttggctttatatatcttgtggaaaggacgaaacaccgtaatttctactaagtgtagataaacgcaacagagtctggtgtaatttctactaagtgtagataacggagcgcgatactaccataatttctactaagtgtagatttttttnnnnnnnnnnaagcttggcgtggatccgatatcaactagatcttgagacaaatggcagtattcatccacaattttaaaagaaaaggggggattggggggtacagtgcaggggaaagaatagtagacataatagcaacagacatacaaactaaag

SEQ ID NO: 19883 - DNA, 301 bp, Artificial Sequence
  Ube2g2.3_NTC.39
  crRNA array
  misc_feature (148)..(157): n is a, c, g, or t
cttggctttatatatcttgtggaaaggacgaaacaccgtaatttctactaagtgtagataaacgcaacagagtctggtgtaatttctactaagtgtagatccggacgttataacgtttcttaatttctactaagtgtagatttttttnnnnnnnnnnaagcttggcgtggatccgatatcaactagatcttgagacaaatggcagtattcatccacaattttaaaagaaaaggggggattggggggtacagtgcaggggaaagaatagtagacataatagcaacagacatacaaactaaag

SEQ ID NO: 19884 - DNA, 301 bp, Artificial Sequence
  Ube2g2.3_NTC.4
  crRNA array
  misc_feature (148)..(157): n is a, c, g, or t
cttggctttatatatcttgtggaaaggacgaaacaccgtaatttctactaagtgtagataaacgcaacagagtctggtgtaatttctactaagtgtagatatacccgtcgcgaacgtgagtaatttctactaagtgtagatttttttnnnnnnnnnnaagcttggcgtggatccgatatcaactagatcttgagacaaatggcagtattcatccacaattttaaaagaaaaggggggattggggggtacagtgcaggggaaagaatagtagacataatagcaacagacatacaaactaaag

SEQ ID NO: 19885 - DNA, 301 bp, Artificial Sequence
  Ube2g2.3_NTC.40
  crRNA array
  misc_feature (148)..(157): n is a, c, g, or t
cttggctttatatatcttgtggaaaggacgaaacaccgtaatttctactaagtgtagataaacgcaacagagtctggtgtaatttctactaagtgtagatattcgcgaacccggccggaataatttctactaagtgtagatttttttnnnnnnnnnnaagcttggcgtggatccgatatcaactagatcttgagacaaatggcagtattcatccacaattttaaaagaaaaggggggattggggggtacagtgcaggggaaagaatagtagacataatagcaacagacatacaaactaaag

SEQ ID NO: 19886 - DNA, 301 bp, Artificial Sequence
  Ube2g2.3_NTC.41
  crRNA array
  misc_feature (148)..(157): n is a, c, g, or t
cttggctttatatatcttgtggaaaggacgaaacaccgtaatttctactaagtgtagataaacgcaacagagtctggtgtaatttctactaagtgtagatttgatggcgcgacgcgttattaatttctactaagtgtagatttttttnnnnnnnnnnaagcttggcgtggatccgatatcaactagatcttgagacaaatggcagtattcatccacaattttaaaagaaaaggggggattggggggtacagtgcaggggaaagaatagtagacataatagcaacagacatacaaactaaag

SEQ ID NO: 19887 - DNA, 301 bp, Artificial Sequence
  Ube2g2.3_NTC.42
  crRNA array
  misc_feature (148)..(157): n is a, c, g, or t
cttggctttatatatcttgtggaaaggacgaaacaccgtaatttctactaagtgtagataaacgcaacagagtctggtgtaatttctactaagtgtagatggtcaaatcgcggcgataactaatttctactaagtgtagatttttttnnnnnnnnnnaagcttggcgtggatccgatatcaactagatcttgagacaaatggcagtattcatccacaattttaaaagaaaaggggggattggggggtacagtgcaggggaaagaatagtagacataatagcaacagacatacaaactaaag

SEQ ID NO: 19888 - DNA, 301 bp, Artificial Sequence
  Ube2g2.3_NTC.43
  crRNA array
  misc_feature (148)..(157): n is a, c, g, or t
cttggctttatatatcttgtggaaaggacgaaacaccgtaatttctactaagtgtagataaacgcaacagagtctggtgtaatttctactaagtgtagatcgactcgcgcattgaactggtaatttctactaagtgtagatttttttnnnnnnnnnnaagcttggcgtggatccgatatcaactagatcttgagacaaatggcagtattcatccacaattttaaaagaaaaggggggattggggggtacagtgcaggggaaagaatagtagacataatagcaacagacatacaaactaaag

SEQ ID NO: 19889 - DNA, 301 bp, Artificial Sequence
  Ube2g2.3_NTC.44
  crRNA array
  misc_feature (148)..(157): n is a, c, g, or t
cttggctttatatatcttgtggaaaggacgaaacaccgtaatttctactaagtgtagataaacgcaacagagtctggtgtaatttctactaagtgtagatagcgtcgtacgatttatcgttaatttctactaagtgtagatttttttnnnnnnnnnnaagcttggcgtggatccgatatcaactagatcttgagacaaatggcagtattcatccacaattttaaaagaaaaggggggattggggggtacagtgcaggggaaagaatagtagacataatagcaacagacatacaaactaaag

SEQ ID NO: 19890 - DNA, 301 bp, Artificial Sequence
  Ube2g2.3_NTC.45
  crRNA array
  misc_feature (148)..(157): n is a, c, g, or t
cttggctttatatatcttgtggaaaggacgaaacaccgtaatttctactaagtgtagataaacgcaacagagtctggtgtaatttctactaagtgtagatcggaacgcgtgatactagggtaatttctactaagtgtagatttttttnnnnnnnnnnaagcttggcgtggatccgatatcaactagatcttgagacaaatggcagtattcatccacaattttaaaagaaaaggggggattggggggtacagtgcaggggaaagaatagtagacataatagcaacagacatacaaactaaag

SEQ ID NO: 19891 - DNA, 301 bp, Artificial Sequence
  Ube2g2.3_NTC.46
  crRNA array
  misc_feature (148)..(157): n is a, c, g, or t
cttggctttatatatcttgtggaaaggacgaaacaccgtaatttctactaagtgtagataaacgcaacagagtctggtgtaatttctactaagtgtagatagcgggtcgtagacgcgcggtaatttctactaagtgtagatttttttnnnnnnnnnnaagcttggcgtggatccgatatcaactagatcttgagacaaatggcagtattcatccacaattttaaaagaaaaggggggattggggggtacagtgcaggggaaagaatagtagacataatagcaacagacatacaaactaaag

SEQ ID NO: 19892 - DNA, 301 bp, Artificial Sequence
  Ube2g2.3_NTC.47
  crRNA array
  misc_feature (148)..(157): n is a, c, g, or t
cttggctttatatatcttgtggaaaggacgaaacaccgtaatttctactaagtgtagataaacgcaacagagtctggtgtaatttctactaagtgtagattctcgtatcgcgattgttaataatttctactaagtgtagatttttttnnnnnnnnnnaagcttggcgtggatccgatatcaactagatcttgagacaaatggcagtattcatccacaattttaaaagaaaaggggggattggggggtacagtgcaggggaaagaatagtagacataatagcaacagacatacaaactaaag

SEQ ID NO: 19893 - DNA, 301 bp, Artificial Sequence
  Ube2g2.3_NTC.48
  crRNA array
  misc_feature (148)..(157): n is a, c, g, or t
cttggctttatatatcttgtggaaaggacgaaacaccgtaatttctactaagtgtagataaacgcaacagagtctggtgtaatttctactaagtgtagatcggtcgactacggctgttagtaatttctactaagtgtagatttttttnnnnnnnnnnaagcttggcgtggatccgatatcaactagatcttgagacaaatggcagtattcatccacaattttaaaagaaaaggggggattggggggtacagtgcaggggaaagaatagtagacataatagcaacagacatacaaactaaag

SEQ ID NO: 19894 - DNA, 301 bp, Artificial Sequence
  Ube2g2.3_NTC.49
  crRNA array
  misc_feature (148)..(157): n is a, c, g, or t
cttggctttatatatcttgtggaaaggacgaaacaccgtaatttctactaagtgtagataaacgcaacagagtctggtgtaatttctactaagtgtagattcggggcgcgtcaactgaattaatttctactaagtgtagatttttttnnnnnnnnnnaagcttggcgtggatccgatatcaactagatcttgagacaaatggcagtattcatccacaattttaaaagaaaaggggggattggggggtacagtgcaggggaaagaatagtagacataatagcaacagacatacaaactaaag

SEQ ID NO: 19895 - DNA, 301 bp, Artificial Sequence
  Ube2g2.3_NTC.5
  crRNA array
  misc_feature (148)..(157): n is a, c, g, or t
cttggctttatatatcttgtggaaaggacgaaacaccgtaatttctactaagtgtagataaacgcaacagagtctggtgtaatttctactaagtgtagatgcttacgcgtcgcgaatgtataatttctactaagtgtagatttttttnnnnnnnnnnaagcttggcgtggatccgatatcaactagatcttgagacaaatggcagtattcatccacaattttaaaagaaaaggggggattggggggtacagtgcaggggaaagaatagtagacataatagcaacagacatacaaactaaag

SEQ ID NO: 19896 - DNA, 301 bp, Artificial Sequence
  Ube2g2.3_NTC.50
  crRNA array
  misc_feature (148)..(157): n is a, c, g, or t
cttggctttatatatcttgtggaaaggacgaaacaccgtaatttctactaagtgtagataaacgcaacagagtctggtgtaatttctactaagtgtagatattgccgctcgcgcaaaatctaatttctactaagtgtagatttttttnnnnnnnnnnaagcttggcgtggatccgatatcaactagatcttgagacaaatggcagtattcatccacaattttaaaagaaaaggggggattggggggtacagtgcaggggaaagaatagtagacataatagcaacagacatacaaactaaag

SEQ ID NO: 19897 - DNA, 301 bp, Artificial Sequence
  Ube2g2.3_NTC.51
  crRNA array
  misc_feature (148)..(157): n is a, c, g, or t
cttggctttatatatcttgtggaaaggacgaaacaccgtaatttctactaagtgtagataaacgcaacagagtctggtgtaatttctactaagtgtagattaacgcgcaacacgccaatgtaatttctactaagtgtagatttttttnnnnnnnnnnaagcttggcgtggatccgatatcaactagatcttgagacaaatggcagtattcatccacaattttaaaagaaaaggggggattggggggtacagtgcaggggaaagaatagtagacataatagcaacagacatacaaactaaag

SEQ ID NO: 19898 - DNA, 301 bp, Artificial Sequence
  Ube2g2.3_NTC.6
  crRNA array
  misc_feature (148)..(157): n is a, c, g, or t
cttggctttatatatcttgtggaaaggacgaaacaccgtaatttctactaagtgtagataaacgcaacagagtctggtgtaatttctactaagtgtagatcgaatcgcgcctacgggaattaatttctactaagtgtagatttttttnnnnnnnnnnaagcttggcgtggatccgatatcaactagatcttgagacaaatggcagtattcatccacaattttaaaagaaaaggggggattggggggtacagtgcaggggaaagaatagtagacataatagcaacagacatacaaactaaag

SEQ ID NO: 19899 - DNA, 301 bp, Artificial Sequence
  Ube2g2.3_NTC.7
  crRNA array
  misc_feature (148)..(157): n is a, c, g, or t
cttggctttatatatcttgtggaaaggacgaaacaccgtaatttctactaagtgtagataaacgcaacagagtctggtgtaatttctactaagtgtagatcgccgaacggataagactattaatttctactaagtgtagatttttttnnnnnnnnnnaagcttggcgtggatccgatatcaactagatcttgagacaaatggcagtattcatccacaattttaaaagaaaaggggggattggggggtacagtgcaggggaaagaatagtagacataatagcaacagacatacaaactaaag

SEQ ID NO: 19900 - DNA, 301 bp, Artificial Sequence
  Ube2g2.3_NTC.8
  crRNA array
  misc_feature (148)..(157): n is a, c, g, or t
cttggctttatatatcttgtggaaaggacgaaacaccgtaatttctactaagtgtagataaacgcaacagagtctggtgtaatttctactaagtgtagatcgaccgaggttacgctgggataatttctactaagtgtagatttttttnnnnnnnnnnaagcttggcgtggatccgatatcaactagatcttgagacaaatggcagtattcatccacaattttaaaagaaaaggggggattggggggtacagtgcaggggaaagaatagtagacataatagcaacagacatacaaactaaag

SEQ ID NO: 19901 - DNA, 301 bp, Artificial Sequence
  Ube2g2.3_NTC.9
  crRNA array
  misc_feature (148)..(157): n is a, c, g, or t
cttggctttatatatcttgtggaaaggacgaaacaccgtaatttctactaagtgtagataaacgcaacagagtctggtgtaatttctactaagtgtagatatcgccgtacggctatggcataatttctactaagtgtagatttttttnnnnnnnnnnaagcttggcgtggatccgatatcaactagatcttgagacaaatggcagtattcatccacaattttaaaagaaaaggggggattggggggtacagtgcaggggaaagaatagtagacataatagcaacagacatacaaactaaag

SEQ ID NO: 19902 - DNA, 301 bp, Artificial Sequence
  Ube2g2.4_NTC.0
  crRNA array
  misc_feature (148)..(157): n is a, c, g, or t
cttggctttatatatcttgtggaaaggacgaaacaccgtaatttctactaagtgtagatgaaaaggccaagcatccacctaatttctactaagtgtagattatagcgtcgcgcgctaatttaatttctactaagtgtagatttttttnnnnnnnnnnaagcttggcgtggatccgatatcaactagatcttgagacaaatggcagtattcatccacaattttaaaagaaaaggggggattggggggtacagtgcaggggaaagaatagtagacataatagcaacagacatacaaactaaag

SEQ ID NO: 19903 - DNA, 301 bp, Artificial Sequence
  Ube2g2.4_NTC.1
  crRNA array
  misc_feature (148)..(157): n is a, c, g, or t
cttggctttatatatcttgtggaaaggacgaaacaccgtaatttctactaagtgtagatgaaaaggccaagcatccacctaatttctactaagtgtagatcgcgtaaccgttccggctcctaatttctactaagtgtagatttttttnnnnnnnnnnaagcttggcgtggatccgatatcaactagatcttgagacaaatggcagtattcatccacaattttaaaagaaaaggggggattggggggtacagtgcaggggaaagaatagtagacataatagcaacagacatacaaactaaag

SEQ ID NO: 19904 - DNA, 301 bp, Artificial Sequence
  Ube2g2.4_NTC.10
  crRNA array
  misc_feature (148)..(157): n is a, c, g, or t
cttggctttatatatcttgtggaaaggacgaaacaccgtaatttctactaagtgtagatgaaaaggccaagcatccacctaatttctactaagtgtagatcgctaagttcgcgcgggccgtaatttctactaagtgtagatttttttnnnnnnnnnnaagcttggcgtggatccgatatcaactagatcttgagacaaatggcagtattcatccacaattttaaaagaaaaggggggattggggggtacagtgcaggggaaagaatagtagacataatagcaacagacatacaaactaaag

SEQ ID NO: 19905 - DNA, 301 bp, Artificial Sequence
  Ube2g2.4_NTC.11
  crRNA array
  misc_feature (148)..(157): n is a, c, g, or t
cttggctttatatatcttgtggaaaggacgaaacaccgtaatttctactaagtgtagatgaaaaggccaagcatccacctaatttctactaagtgtagatcgttcgtcgacgaagcaatctaatttctactaagtgtagatttttttnnnnnnnnnnaagcttggcgtggatccgatatcaactagatcttgagacaaatggcagtattcatccacaattttaaaagaaaaggggggattggggggtacagtgcaggggaaagaatagtagacataatagcaacagacatacaaactaaag

SEQ ID NO: 19906 - DNA, 301 bp, Artificial Sequence
  Ube2g2.4_NTC.12
  crRNA array
  misc_feature (148)..(157): n is a, c, g, or t
cttggctttatatatcttgtggaaaggacgaaacaccgtaatttctactaagtgtagatgaaaaggccaagcatccacctaatttctactaagtgtagatcgccgacgattaatcaatagtaatttctactaagtgtagatttttttnnnnnnnnnnaagcttggcgtggatccgatatcaactagatcttgagacaaatggcagtattcatccacaattttaaaagaaaaggggggattggggggtacagtgcaggggaaagaatagtagacataatagcaacagacatacaaactaaag

SEQ ID NO: 19907 - DNA, 301 bp, Artificial Sequence
  Ube2g2.4_NTC.13
  crRNA array
  misc_feature (148)..(157): n is a, c, g, or t
cttggctttatatatcttgtggaaaggacgaaacaccgtaatttctactaagtgtagatgaaaaggccaagcatccacctaatttctactaagtgtagatgaccgttgtatcgcgatcaataatttctactaagtgtagatttttttnnnnnnnnnnaagcttggcgtggatccgatatcaactagatcttgagacaaatggcagtattcatccacaattttaaaagaaaaggggggattggggggtacagtgcaggggaaagaatagtagacataatagcaacagacatacaaactaaag

SEQ ID NO: 19908 - DNA, 301 bp, Artificial Sequence
  Ube2g2.4_NTC.14
  crRNA array
  misc_feature (148)..(157): n is a, c, g, or t
cttggctttatatatcttgtggaaaggacgaaacaccgtaatttctactaagtgtagatgaaaaggccaagcatccacctaatttctactaagtgtagatccgttcgtgcgatagtgttttaatttctactaagtgtagatttttttnnnnnnnnnnaagcttggcgtggatccgatatcaactagatcttgagacaaatggcagtattcatccacaattttaaaagaaaaggggggattggggggtacagtgcaggggaaagaatagtagacataatagcaacagacatacaaactaaag

SEQ ID NO: 19909 - DNA, 301 bp, Artificial Sequence
  Ube2g2.4_NTC.15
  crRNA array
  misc_feature (148)..(157): n is a, c, g, or t
cttggctttatatatcttgtggaaaggacgaaacaccgtaatttctactaagtgtagatgaaaaggccaagcatccacctaatttctactaagtgtagatgttgtcgtgccgcgaatttataatttctactaagtgtagatttttttnnnnnnnnnnaagcttggcgtggatccgatatcaactagatcttgagacaaatggcagtattcatccacaattttaaaagaaaaggggggattggggggtacagtgcaggggaaagaatagtagacataatagcaacagacatacaaactaaag

SEQ ID NO: 19910 - DNA, 301 bp, Artificial Sequence
  Ube2g2.4_NTC.16
  crRNA array
  misc_feature (148)..(157): n is a, c, g, or t
cttggctttatatatcttgtggaaaggacgaaacaccgtaatttctactaagtgtagatgaaaaggccaagcatccacctaatttctactaagtgtagatcggtacgttagacgaaaatttaatttctactaagtgtagatttttttnnnnnnnnnnaagcttggcgtggatccgatatcaactagatcttgagacaaatggcagtattcatccacaattttaaaagaaaaggggggattggggggtacagtgcaggggaaagaatagtagacataatagcaacagacatacaaactaaag

SEQ ID NO: 19911 - DNA, 301 bp, Artificial Sequence
  Ube2g2.4_NTC.17
  crRNA array
  misc_feature (148)..(157): n is a, c, g, or t
cttggctttatatatcttgtggaaaggacgaaacaccgtaatttctactaagtgtagatgaaaaggccaagcatccacctaatttctactaagtgtagattatcgaacgctatcgaacgttaatttctactaagtgtagatttttttnnnnnnnnnnaagcttggcgtggatccgatatcaactagatcttgagacaaatggcagtattcatccacaattttaaaagaaaaggggggattggggggtacagtgcaggggaaagaatagtagacataatagcaacagacatacaaactaaag

SEQ ID NO: 19912 - DNA, 301 bp, Artificial Sequence
  Ube2g2.4_NTC.18
  crRNA array
  misc_feature (148)..(157): n is a, c, g, or t
cttggctttatatatcttgtggaaaggacgaaacaccgtaatttctactaagtgtagatgaaaaggccaagcatccacctaatttctactaagtgtagattccggttacgaccggcaaaataatttctactaagtgtagatttttttnnnnnnnnnnaagcttggcgtggatccgatatcaactagatcttgagacaaatggcagtattcatccacaattttaaaagaaaaggggggattggggggtacagtgcaggggaaagaatagtagacataatagcaacagacatacaaactaaag

SEQ ID NO: 19913 - DNA, 301 bp, Artificial Sequence
  Ube2g2.4_NTC.19
  crRNA array
  misc_feature (148)..(157): n is a, c, g, or t
cttggctttatatatcttgtggaaaggacgaaacaccgtaatttctactaagtgtagatgaaaaggccaagcatccacctaatttctactaagtgtagatcgtcgtagaacgatacccgataatttctactaagtgtagatttttttnnnnnnnnnnaagcttggcgtggatccgatatcaactagatcttgagacaaatggcagtattcatccacaattttaaaagaaaaggggggattggggggtacagtgcaggggaaagaatagtagacataatagcaacagacatacaaactaaag

SEQ ID NO: 19914 - DNA, 301 bp, Artificial Sequence
  Ube2g2.4_NTC.2
  crRNA array
  misc_feature (148)..(157): n is a, c, g, or t
cttggctttatatatcttgtggaaaggacgaaacaccgtaatttctactaagtgtagatgaaaaggccaagcatccacctaatttctactaagtgtagatttatgtcgcgccgcgacccgtaatttctactaagtgtagatttttttnnnnnnnnnnaagcttggcgtggatccgatatcaactagatcttgagacaaatggcagtattcatccacaattttaaaagaaaaggggggattggggggtacagtgcaggggaaagaatagtagacataatagcaacagacatacaaactaaag

SEQ ID NO: 19915 - DNA, 301 bp, Artificial Sequence
  Ube2g2.4_NTC.20
  crRNA array
  misc_feature (148)..(157): n is a, c, g, or t
cttggctttatatatcttgtggaaaggacgaaacaccgtaatttctactaagtgtagatgaaaaggccaagcatccacctaatttctactaagtgtagatattccggcgcgaccagaagataatttctactaagtgtagatttttttnnnnnnnnnnaagcttggcgtggatccgatatcaactagatcttgagacaaatggcagtattcatccacaattttaaaagaaaaggggggattggggggtacagtgcaggggaaagaatagtagacataatagcaacagacatacaaactaaag

SEQ ID NO: 19916 - DNA, 301 bp, Artificial Sequence
  Ube2g2.4_NTC.21
  crRNA array
  misc_feature (148)..(157): n is a, c, g, or t
cttggctttatatatcttgtggaaaggacgaaacaccgtaatttctactaagtgtagatgaaaaggccaagcatccacctaatttctactaagtgtagatgtataacttcgcgcggtccgtaatttctactaagtgtagatttttttnnnnnnnnnnaagcttggcgtggatccgatatcaactagatcttgagacaaatggcagtattcatccacaattttaaaagaaaaggggggattggggggtacagtgcaggggaaagaatagtagacataatagcaacagacatacaaactaaag

SEQ ID NO: 19917 - DNA, 301 bp, Artificial Sequence
  Ube2g2.4_NTC.22
  crRNA array
  misc_feature (148)..(157): n is a, c, g, or t
cttggctttatatatcttgtggaaaggacgaaacaccgtaatttctactaagtgtagatgaaaaggccaagcatccacctaatttctactaagtgtagatgcgcgtcaacgtaatgtgcctaatttctactaagtgtagatttttttnnnnnnnnnnaagcttggcgtggatccgatatcaactagatcttgagacaaatggcagtattcatccacaattttaaaagaaaaggggggattggggggtacagtgcaggggaaagaatagtagacataatagcaacagacatacaaactaaag

SEQ ID NO: 19918 - DNA, 301 bp, Artificial Sequence
  Ube2g2.4_NTC.23
  crRNA array
  misc_feature (148)..(157): n is a, c, g, or t
cttggctttatatatcttgtggaaaggacgaaacaccgtaatttctactaagtgtagatgaaaaggccaagcatccacctaatttctactaagtgtagatacgcgctattatcgtaggtgtaatttctactaagtgtagatttttttnnnnnnnnnnaagcttggcgtggatccgatatcaactagatcttgagacaaatggcagtattcatccacaattttaaaagaaaaggggggattggggggtacagtgcaggggaaagaatagtagacataatagcaacagacatacaaactaaag

SEQ ID NO: 19919 - DNA, 301 bp, Artificial Sequence
  Ube2g2.4_NTC.24
  crRNA array
  misc_feature (148)..(157): n is a, c, g, or t
cttggctttatatatcttgtggaaaggacgaaacaccgtaatttctactaagtgtagatgaaaaggccaagcatccacctaatttctactaagtgtagatactatcgacgttcgtcccggtaatttctactaagtgtagatttttttnnnnnnnnnnaagcttggcgtggatccgatatcaactagatcttgagacaaatggcagtattcatccacaattttaaaagaaaaggggggattggggggtacagtgcaggggaaagaatagtagacataatagcaacagacatacaaactaaag

SEQ ID NO: 19920 - DNA, 301 bp, Artificial Sequence
  Ube2g2.4_NTC.25
  crRNA array
  misc_feature (148)..(157): n is a, c, g, or t
cttggctttatatatcttgtggaaaggacgaaacaccgtaatttctactaagtgtagatgaaaaggccaagcatccacctaatttctactaagtgtagattcgcgttatcgtgccgtgcgtaatttctactaagtgtagatttttttnnnnnnnnnnaagcttggcgtggatccgatatcaactagatcttgagacaaatggcagtattcatccacaattttaaaagaaaaggggggattggggggtacagtgcaggggaaagaatagtagacataatagcaacagacatacaaactaaag

SEQ ID NO: 19921 - DNA, 301 bp, Artificial Sequence
  Ube2g2.4_NTC.26
  crRNA array
  misc_feature (148)..(157): n is a, c, g, or t
cttggctttatatatcttgtggaaaggacgaaacaccgtaatttctactaagtgtagatgaaaaggccaagcatccacctaatttctactaagtgtagatcgcgacggcggttttaacactaatttctactaagtgtagatttttttnnnnnnnnnnaagcttggcgtggatccgatatcaactagatcttgagacaaatggcagtattcatccacaattttaaaagaaaaggggggattggggggtacagtgcaggggaaagaatagtagacataatagcaacagacatacaaactaaag

SEQ ID NO: 19922 - DNA, 301 bp, Artificial Sequence
  Ube2g2.4_NTC.27
  crRNA array
  misc_feature (148)..(157): n is a, c, g, or t
cttggctttatatatcttgtggaaaggacgaaacaccgtaatttctactaagtgtagatgaaaaggccaagcatccacctaatttctactaagtgtagatgtcgcgttgcgaccggcgcttaatttctactaagtgtagatttttttnnnnnnnnnnaagcttggcgtggatccgatatcaactagatcttgagacaaatggcagtattcatccacaattttaaaagaaaaggggggattggggggtacagtgcaggggaaagaatagtagacataatagcaacagacatacaaactaaag

SEQ ID NO: 19923 - DNA, 301 bp, Artificial Sequence
  Ube2g2.4_NTC.28
  crRNA array
  misc_feature (148)..(157): n is a, c, g, or t
cttggctttatatatcttgtggaaaggacgaaacaccgtaatttctactaagtgtagatgaaaaggccaagcatccacctaatttctactaagtgtagataccgctaatcggcgtaaacttaatttctactaagtgtagatttttttnnnnnnnnnnaagcttggcgtggatccgatatcaactagatcttgagacaaatggcagtattcatccacaattttaaaagaaaaggggggattggggggtacagtgcaggggaaagaatagtagacataatagcaacagacatacaaactaaag

SEQ ID NO: 19924 - DNA, 301 bp, Artificial Sequence
  Ube2g2.4_NTC.29
  crRNA array
  misc_feature (148)..(157): n is a, c, g, or t
cttggctttatatatcttgtggaaaggacgaaacaccgtaatttctactaagtgtagatgaaaaggccaagcatccacctaatttctactaagtgtagatcgcgatctataccgtctatataatttctactaagtgtagatttttttnnnnnnnnnnaagcttggcgtggatccgatatcaactagatcttgagacaaatggcagtattcatccacaattttaaaagaaaaggggggattggggggtacagtgcaggggaaagaatagtagacataatagcaacagacatacaaactaaag

SEQ ID NO: 19925 - DNA, 301 bp, Artificial Sequence
  Ube2g2.4_NTC.3
  crRNA array
  misc_feature (148)..(157): n is a, c, g, or t
cttggctttatatatcttgtggaaaggacgaaacaccgtaatttctactaagtgtagatgaaaaggccaagcatccacctaatttctactaagtgtagattcgacgcgagacgacgtacataatttctactaagtgtagatttttttnnnnnnnnnnaagcttggcgtggatccgatatcaactagatcttgagacaaatggcagtattcatccacaattttaaaagaaaaggggggattggggggtacagtgcaggggaaagaatagtagacataatagcaacagacatacaaactaaag

SEQ ID NO: 19926 - DNA, 301 bp, Artificial Sequence
  Ube2g2.4_NTC.30
  crRNA array
  misc_feature (148)..(157): n is a, c, g, or t
cttggctttatatatcttgtggaaaggacgaaacaccgtaatttctactaagtgtagatgaaaaggccaagcatccacctaatttctactaagtgtagatcgatcgtacgggtgtcctaataatttctactaagtgtagatttttttnnnnnnnnnnaagcttggcgtggatccgatatcaactagatcttgagacaaatggcagtattcatccacaattttaaaagaaaaggggggattggggggtacagtgcaggggaaagaatagtagacataatagcaacagacatacaaactaaag

SEQ ID NO: 19927 - DNA, 301 bp, Artificial Sequence
  Ube2g2.4_NTC.31
  crRNA array
  misc_feature (148)..(157): n is a, c, g, or t
cttggctttatatatcttgtggaaaggacgaaacaccgtaatttctactaagtgtagatgaaaaggccaagcatccacctaatttctactaagtgtagatgccgaccgcgtgattgtaggtaatttctactaagtgtagatttttttnnnnnnnnnnaagcttggcgtggatccgatatcaactagatcttgagacaaatggcagtattcatccacaattttaaaagaaaaggggggattggggggtacagtgcaggggaaagaatagtagacataatagcaacagacatacaaactaaag

SEQ ID NO: 19928 - DNA, 301 bp, Artificial Sequence
  Ube2g2.4_NTC.32
  crRNA array
  misc_feature (148)..(157): n is a, c, g, or t
cttggctttatatatcttgtggaaaggacgaaacaccgtaatttctactaagtgtagatgaaaaggccaagcatccacctaatttctactaagtgtagatgcacgttacgcccgggtcactaatttctactaagtgtagatttttttnnnnnnnnnnaagcttggcgtggatccgatatcaactagatcttgagacaaatggcagtattcatccacaattttaaaagaaaaggggggattggggggtacagtgcaggggaaagaatagtagacataatagcaacagacatacaaactaaag

SEQ ID NO: 19929 - DNA, 301 bp, Artificial Sequence
  Ube2g2.4_NTC.33
  crRNA array
  misc_feature (148)..(157): n is a, c, g, or t
cttggctttatatatcttgtggaaaggacgaaacaccgtaatttctactaagtgtagatgaaaaggccaagcatccacctaatttctactaagtgtagattaagcgaccgacgcattcgctaatttctactaagtgtagatttttttnnnnnnnnnnaagcttggcgtggatccgatatcaactagatcttgagacaaatggcagtattcatccacaattttaaaagaaaaggggggattggggggtacagtgcaggggaaagaatagtagacataatagcaacagacatacaaactaaag

SEQ ID NO: 19930 - DNA, 301 bp, Artificial Sequence
  Ube2g2.4_NTC.34
  crRNA array
  misc_feature (148)..(157): n is a, c, g, or t
cttggctttatatatcttgtggaaaggacgaaacaccgtaatttctactaagtgtagatgaaaaggccaagcatccacctaatttctactaagtgtagattagcgttcgacacgtgaaactaatttctactaagtgtagatttttttnnnnnnnnnnaagcttggcgtggatccgatatcaactagatcttgagacaaatggcagtattcatccacaattttaaaagaaaaggggggattggggggtacagtgcaggggaaagaatagtagacataatagcaacagacatacaaactaaag

SEQ ID NO: 19931 - DNA, 301 bp, Artificial Sequence
  Ube2g2.4_NTC.35
  crRNA array
  misc_feature (148)..(157): n is a, c, g, or t
cttggctttatatatcttgtggaaaggacgaaacaccgtaatttctactaagtgtagatgaaaaggccaagcatccacctaatttctactaagtgtagattggcgcgtaatcgctattcgtaatttctactaagtgtagatttttttnnnnnnnnnnaagcttggcgtggatccgatatcaactagatcttgagacaaatggcagtattcatccacaattttaaaagaaaaggggggattggggggtacagtgcaggggaaagaatagtagacataatagcaacagacatacaaactaaag

SEQ ID NO: 19932 - DNA, 301 bp, Artificial Sequence
  Ube2g2.4_NTC.36
  crRNA array
  misc_feature (148)..(157): n is a, c, g, or t
cttggctttatatatcttgtggaaaggacgaaacaccgtaatttctactaagtgtagatgaaaaggccaagcatccacctaatttctactaagtgtagatcaacccgccgtagcgggccttaatttctactaagtgtagatttttttnnnnnnnnnnaagcttggcgtggatccgatatcaactagatcttgagacaaatggcagtattcatccacaattttaaaagaaaaggggggattggggggtacagtgcaggggaaagaatagtagacataatagcaacagacatacaaactaaag

SEQ ID NO: 19933 - DNA, 301 bp, Artificial Sequence
  Ube2g2.4_NTC.37
  crRNA array
  misc_feature (148)..(157): n is a, c, g, or t
cttggctttatatatcttgtggaaaggacgaaacaccgtaatttctactaagtgtagatgaaaaggccaagcatccacctaatttctactaagtgtagattttgcgttgacgcgattacttaatttctactaagtgtagatttttttnnnnnnnnnnaagcttggcgtggatccgatatcaactagatcttgagacaaatggcagtattcatccacaattttaaaagaaaaggggggattggggggtacagtgcaggggaaagaatagtagacataatagcaacagacatacaaactaaag

SEQ ID NO: 19934 - DNA, 301 bp, Artificial Sequence
  Ube2g2.4_NTC.38
  crRNA array
  misc_feature (148)..(157): n is a, c, g, or t
cttggctttatatatcttgtggaaaggacgaaacaccgtaatttctactaagtgtagatgaaaaggccaagcatccacctaatttctactaagtgtagataacggagcgcgatactaccataatttctactaagtgtagatttttttnnnnnnnnnnaagcttggcgtggatccgatatcaactagatcttgagacaaatggcagtattcatccacaattttaaaagaaaaggggggattggggggtacagtgcaggggaaagaatagtagacataatagcaacagacatacaaactaaag

SEQ ID NO: 19935 - DNA, 301 bp, Artificial Sequence
  Ube2g2.4_NTC.39
  crRNA array
  misc_feature (148)..(157): n is a, c, g, or t
cttggctttatatatcttgtggaaaggacgaaacaccgtaatttctactaagtgtagatgaaaaggccaagcatccacctaatttctactaagtgtagatccggacgttataacgtttcttaatttctactaagtgtagatttttttnnnnnnnnnnaagcttggcgtggatccgatatcaactagatcttgagacaaatggcagtattcatccacaattttaaaagaaaaggggggattggggggtacagtgcaggggaaagaatagtagacataatagcaacagacatacaaactaaag

SEQ ID NO: 19936 - DNA, 301 bp, Artificial Sequence
  Ube2g2.4_NTC.4
  crRNA array
  misc_feature (148)..(157): n is a, c, g, or t
cttggctttatatatcttgtggaaaggacgaaacaccgtaatttctactaagtgtagatgaaaaggccaagcatccacctaatttctactaagtgtagatatacccgtcgcgaacgtgagtaatttctactaagtgtagatttttttnnnnnnnnnnaagcttggcgtggatccgatatcaactagatcttgagacaaatggcagtattcatccacaattttaaaagaaaaggggggattggggggtacagtgcaggggaaagaatagtagacataatagcaacagacatacaaactaaag

SEQ ID NO: 19937 - DNA, 301 bp, Artificial Sequence
  Ube2g2.4_NTC.40
  crRNA array
  misc_feature (148)..(157): n is a, c, g, or t
cttggctttatatatcttgtggaaaggacgaaacaccgtaatttctactaagtgtagatgaaaaggccaagcatccacctaatttctactaagtgtagatattcgcgaacccggccggaataatttctactaagtgtagatttttttnnnnnnnnnnaagcttggcgtggatccgatatcaactagatcttgagacaaatggcagtattcatccacaattttaaaagaaaaggggggattggggggtacagtgcaggggaaagaatagtagacataatagcaacagacatacaaactaaag

SEQ ID NO: 19938 - DNA, 301 bp, Artificial Sequence
  Ube2g2.4_NTC.41
  crRNA array
  misc_feature (148)..(157): n is a, c, g, or t
cttggctttatatatcttgtggaaaggacgaaacaccgtaatttctactaagtgtagatgaaaaggccaagcatccacctaatttctactaagtgtagatttgatggcgcgacgcgttattaatttctactaagtgtagatttttttnnnnnnnnnnaagcttggcgtggatccgatatcaactagatcttgagacaaatggcagtattcatccacaattttaaaagaaaaggggggattggggggtacagtgcaggggaaagaatagtagacataatagcaacagacatacaaactaaag

SEQ ID NO: 19939 - DNA, 301 bp, Artificial Sequence
  Ube2g2.4_NTC.42
  crRNA array
  misc_feature (148)..(157): n is a, c, g, or t
cttggctttatatatcttgtggaaaggacgaaacaccgtaatttctactaagtgtagatgaaaaggccaagcatccacctaatttctactaagtgtagatggtcaaatcgcggcgataactaatttctactaagtgtagatttttttnnnnnnnnnnaagcttggcgtggatccgatatcaactagatcttgagacaaatggcagtattcatccacaattttaaaagaaaaggggggattggggggtacagtgcaggggaaagaatagtagacataatagcaacagacatacaaactaaag

SEQ ID NO: 19940 - DNA, 301 bp, Artificial Sequence
  Ube2g2.4_NTC.43
  crRNA array
  misc_feature (148)..(157): n is a, c, g, or t
cttggctttatatatcttgtggaaaggacgaaacaccgtaatttctactaagtgtagatgaaaaggccaagcatccacctaatttctactaagtgtagatcgactcgcgcattgaactggtaatttctactaagtgtagatttttttnnnnnnnnnnaagcttggcgtggatccgatatcaactagatcttgagacaaatggcagtattcatccacaattttaaaagaaaaggggggattggggggtacagtgcaggggaaagaatagtagacataatagcaacagacatacaaactaaag

SEQ ID NO: 19941 - DNA, 301 bp, Artificial Sequence
  Ube2g2.4_NTC.44
  crRNA array
  misc_feature (148)..(157): n is a, c, g, or t
cttggctttatatatcttgtggaaaggacgaaacaccgtaatttctactaagtgtagatgaaaaggccaagcatccacctaatttctactaagtgtagatagcgtcgtacgatttatcgttaatttctactaagtgtagatttttttnnnnnnnnnnaagcttggcgtggatccgatatcaactagatcttgagacaaatggcagtattcatccacaattttaaaagaaaaggggggattggggggtacagtgcaggggaaagaatagtagacataatagcaacagacatacaaactaaag

SEQ ID NO: 19942 - DNA, 301 bp, Artificial Sequence
  Ube2g2.4_NTC.45
  crRNA array
  misc_feature (148)..(157): n is a, c, g, or t
cttggctttatatatcttgtggaaaggacgaaacaccgtaatttctactaagtgtagatgaaaaggccaagcatccacctaatttctactaagtgtagatcggaacgcgtgatactagggtaatttctactaagtgtagatttttttnnnnnnnnnnaagcttggcgtggatccgatatcaactagatcttgagacaaatggcagtattcatccacaattttaaaagaaaaggggggattggggggtacagtgcaggggaaagaatagtagacataatagcaacagacatacaaactaaag

SEQ ID NO: 19943 - DNA, 301 bp, Artificial Sequence
  Ube2g2.4_NTC.46
  crRNA array
  misc_feature (148)..(157): n is a, c, g, or t
cttggctttatatatcttgtggaaaggacgaaacaccgtaatttctactaagtgtagatgaaaaggccaagcatccacctaatttctactaagtgtagatagcgggtcgtagacgcgcggtaatttctactaagtgtagatttttttnnnnnnnnnnaagcttggcgtggatccgatatcaactagatcttgagacaaatggcagtattcatccacaattttaaaagaaaaggggggattggggggtacagtgcaggggaaagaatagtagacataatagcaacagacatacaaactaaag

SEQ ID NO: 19944 - DNA, 301 bp, Artificial Sequence
  Ube2g2.4_NTC.47
  crRNA array
  misc_feature (148)..(157): n is a, c, g, or t
cttggctttatatatcttgtggaaaggacgaaacaccgtaatttctactaagtgtagatgaaaaggccaagcatccacctaatttctactaagtgtagattctcgtatcgcgattgttaataatttctactaagtgtagatttttttnnnnnnnnnnaagcttggcgtggatccgatatcaactagatcttgagacaaatggcagtattcatccacaattttaaaagaaaaggggggattggggggtacagtgcaggggaaagaatagtagacataatagcaacagacatacaaactaaag

SEQ ID NO: 19945 - DNA, 301 bp, Artificial Sequence
  Ube2g2.4_NTC.48
  crRNA array
  misc_feature (148)..(157): n is a, c, g, or t
cttggctttatatatcttgtggaaaggacgaaacaccgtaatttctactaagtgtagatgaaaaggccaagcatccacctaatttctactaagtgtagatcggtcgactacggctgttagtaatttctactaagtgtagatttttttnnnnnnnnnnaagcttggcgtggatccgatatcaactagatcttgagacaaatggcagtattcatccacaattttaaaagaaaaggggggattggggggtacagtgcaggggaaagaatagtagacataatagcaacagacatacaaactaaag

SEQ ID NO: 19946 - DNA, 301 bp, Artificial Sequence
  Ube2g2.4_NTC.49
  crRNA array
  misc_feature (148)..(157): n is a, c, g, or t
cttggctttatatatcttgtggaaaggacgaaacaccgtaatttctactaagtgtagatgaaaaggccaagcatccacctaatttctactaagtgtagattcggggcgcgtcaactgaattaatttctactaagtgtagatttttttnnnnnnnnnnaagcttggcgtggatccgatatcaactagatcttgagacaaatggcagtattcatccacaattttaaaagaaaaggggggattggggggtacagtgcaggggaaagaatagtagacataatagcaacagacatacaaactaaag

SEQ ID NO: 19947 - DNA, 301 bp, Artificial Sequence
  Ube2g2.4_NTC.5
  crRNA array
  misc_feature (148)..(157): n is a, c, g, or t
cttggctttatatatcttgtggaaaggacgaaacaccgtaatttctactaagtgtagatgaaaaggccaagcatccacctaatttctactaagtgtagatgcttacgcgtcgcgaatgtataatttctactaagtgtagatttttttnnnnnnnnnnaagcttggcgtggatccgatatcaactagatcttgagacaaatggcagtattcatccacaattttaaaagaaaaggggggattggggggtacagtgcaggggaaagaatagtagacataatagcaacagacatacaaactaaag

SEQ ID NO: 19948 - DNA, 301 bp, Artificial Sequence
  Ube2g2.4_NTC.50
  crRNA array
  misc_feature (148)..(157): n is a, c, g, or t
cttggctttatatatcttgtggaaaggacgaaacaccgtaatttctactaagtgtagatgaaaaggccaagcatccacctaatttctactaagtgtagatattgccgctcgcgcaaaatctaatttctactaagtgtagatttttttnnnnnnnnnnaagcttggcgtggatccgatatcaactagatcttgagacaaatggcagtattcatccacaattttaaaagaaaaggggggattggggggtacagtgcaggggaaagaatagtagacataatagcaacagacatacaaactaaag

SEQ ID NO: 19949 - DNA, 301 bp, Artificial Sequence
  Ube2g2.4_NTC.51
  crRNA array
  misc_feature (148)..(157): n is a, c, g, or t
cttggctttatatatcttgtggaaaggacgaaacaccgtaatttctactaagtgtagatgaaaaggccaagcatccacctaatttctactaagtgtagattaacgcgcaacacgccaatgtaatttctactaagtgtagatttttttnnnnnnnnnnaagcttggcgtggatccgatatcaactagatcttgagacaaatggcagtattcatccacaattttaaaagaaaaggggggattggggggtacagtgcaggggaaagaatagtagacataatagcaacagacatacaaactaaag

SEQ ID NO: 19950 - DNA, 301 bp, Artificial Sequence
  Ube2g2.4_NTC.6
  crRNA array
  misc_feature (148)..(157): n is a, c, g, or t
cttggctttatatatcttgtggaaaggacgaaacaccgtaatttctactaagtgtagatgaaaaggccaagcatccacctaatttctactaagtgtagatcgaatcgcgcctacgggaattaatttctactaagtgtagatttttttnnnnnnnnnnaagcttggcgtggatccgatatcaactagatcttgagacaaatggcagtattcatccacaattttaaaagaaaaggggggattggggggtacagtgcaggggaaagaatagtagacataatagcaacagacatacaaactaaag

SEQ ID NO: 19951 - DNA, 301 bp, Artificial Sequence
  Ube2g2.4_NTC.7
  crRNA array
  misc_feature (148)..(157): n is a, c, g, or t
cttggctttatatatcttgtggaaaggacgaaacaccgtaatttctactaagtgtagatgaaaaggccaagcatccacctaatttctactaagtgtagatcgccgaacggataagactattaatttctactaagtgtagatttttttnnnnnnnnnnaagcttggcgtggatccgatatcaactagatcttgagacaaatggcagtattcatccacaattttaaaagaaaaggggggattggggggtacagtgcaggggaaagaatagtagacataatagcaacagacatacaaactaaag

SEQ ID NO: 19952 - DNA, 301 bp, Artificial Sequence
  Ube2g2.4_NTC.8
  crRNA array
  misc_feature (148)..(157): n is a, c, g, or t
cttggctttatatatcttgtggaaaggacgaaacaccgtaatttctactaagtgtagatgaaaaggccaagcatccacctaatttctactaagtgtagatcgaccgaggttacgctgggataatttctactaagtgtagatttttttnnnnnnnnnnaagcttggcgtggatccgatatcaactagatcttgagacaaatggcagtattcatccacaattttaaaagaaaaggggggattggggggtacagtgcaggggaaagaatagtagacataatagcaacagacatacaaactaaag

SEQ ID NO: 19953 - DNA, 301 bp, Artificial Sequence
  Ube2g2.4_NTC.9
  crRNA array
  misc_feature (148)..(157): n is a, c, g, or t
cttggctttatatatcttgtggaaaggacgaaacaccgtaatttctactaagtgtagatgaaaaggccaagcatccacctaatttctactaagtgtagatatcgccgtacggctatggcataatttctactaagtgtagatttttttnnnnnnnnnnaagcttggcgtggatccgatatcaactagatcttgagacaaatggcagtattcatccacaattttaaaagaaaaggggggattggggggtacagtgcaggggaaagaatagtagacataatagcaacagacatacaaactaaag

SEQ ID NO: 19954 - DNA, 301 bp, Artificial Sequence
  Wrn.1_NTC.0
  crRNA array
  misc_feature (148)..(157): n is a, c, g, or t
cttggctttatatatcttgtggaaaggacgaaacaccgtaatttctactaagtgtagatgcaaaccactcgggtaattttaatttctactaagtgtagattatagcgtcgcgcgctaatttaatttctactaagtgtagatttttttnnnnnnnnnnaagcttggcgtggatccgatatcaactagatcttgagacaaatggcagtattcatccacaattttaaaagaaaaggggggattggggggtacagtgcaggggaaagaatagtagacataatagcaacagacatacaaactaaag

SEQ ID NO: 19955 - DNA, 301 bp, Artificial Sequence
  Wrn.1_NTC.1
  crRNA array
  misc_feature (148)..(157): n is a, c, g, or t
cttggctttatatatcttgtggaaaggacgaaacaccgtaatttctactaagtgtagatgcaaaccactcgggtaattttaatttctactaagtgtagatcgcgtaaccgttccggctcctaatttctactaagtgtagatttttttnnnnnnnnnnaagcttggcgtggatccgatatcaactagatcttgagacaaatggcagtattcatccacaattttaaaagaaaaggggggattggggggtacagtgcaggggaaagaatagtagacataatagcaacagacatacaaactaaag

SEQ ID NO: 19956 - DNA, 301 bp, Artificial Sequence
  Wrn.1_NTC.10
  crRNA array
  misc_feature (148)..(157): n is a, c, g, or t
cttggctttatatatcttgtggaaaggacgaaacaccgtaatttctactaagtgtagatgcaaaccactcgggtaattttaatttctactaagtgtagatcgctaagttcgcgcgggccgtaatttctactaagtgtagatttttttnnnnnnnnnnaagcttggcgtggatccgatatcaactagatcttgagacaaatggcagtattcatccacaattttaaaagaaaaggggggattggggggtacagtgcaggggaaagaatagtagacataatagcaacagacatacaaactaaag

SEQ ID NO: 19957 - DNA, 301 bp, Artificial Sequence
  Wrn.1_NTC.11
  crRNA array
  misc_feature (148)..(157): n is a, c, g, or t
cttggctttatatatcttgtggaaaggacgaaacaccgtaatttctactaagtgtagatgcaaaccactcgggtaattttaatttctactaagtgtagatcgttcgtcgacgaagcaatctaatttctactaagtgtagatttttttnnnnnnnnnnaagcttggcgtggatccgatatcaactagatcttgagacaaatggcagtattcatccacaattttaaaagaaaaggggggattggggggtacagtgcaggggaaagaatagtagacataatagcaacagacatacaaactaaag

SEQ ID NO: 19958 - DNA, 301 bp, Artificial Sequence
  Wrn.1_NTC.12
  crRNA array
  misc_feature (148)..(157): n is a, c, g, or t
cttggctttatatatcttgtggaaaggacgaaacaccgtaatttctactaagtgtagatgcaaaccactcgggtaattttaatttctactaagtgtagatcgccgacgattaatcaatagtaatttctactaagtgtagatttttttnnnnnnnnnnaagcttggcgtggatccgatatcaactagatcttgagacaaatggcagtattcatccacaattttaaaagaaaaggggggattggggggtacagtgcaggggaaagaatagtagacataatagcaacagacatacaaactaaag

SEQ ID NO: 19959 - DNA, 301 bp, Artificial Sequence
  Wrn.1_NTC.13
  crRNA array
  misc_feature (148)..(157): n is a, c, g, or t
cttggctttatatatcttgtggaaaggacgaaacaccgtaatttctactaagtgtagatgcaaaccactcgggtaattttaatttctactaagtgtagatgaccgttgtatcgcgatcaataatttctactaagtgtagatttttttnnnnnnnnnnaagcttggcgtggatccgatatcaactagatcttgagacaaatggcagtattcatccacaattttaaaagaaaaggggggattggggggtacagtgcaggggaaagaatagtagacataatagcaacagacatacaaactaaag

SEQ ID NO: 19960 - DNA, 301 bp, Artificial Sequence
  Wrn.1_NTC.14
  crRNA array
  misc_feature (148)..(157): n is a, c, g, or t
cttggctttatatatcttgtggaaaggacgaaacaccgtaatttctactaagtgtagatgcaaaccactcgggtaattttaatttctactaagtgtagatccgttcgtgcgatagtgttttaatttctactaagtgtagatttttttnnnnnnnnnnaagcttggcgtggatccgatatcaactagatcttgagacaaatggcagtattcatccacaattttaaaagaaaaggggggattggggggtacagtgcaggggaaagaatagtagacataatagcaacagacatacaaactaaag

SEQ ID NO: 19961 - DNA, 301 bp, Artificial Sequence
  Wrn.1_NTC.15
  crRNA array
  misc_feature (148)..(157): n is a, c, g, or t
cttggctttatatatcttgtggaaaggacgaaacaccgtaatttctactaagtgtagatgcaaaccactcgggtaattttaatttctactaagtgtagatgttgtcgtgccgcgaatttataatttctactaagtgtagatttttttnnnnnnnnnnaagcttggcgtggatccgatatcaactagatcttgagacaaatggcagtattcatccacaattttaaaagaaaaggggggattggggggtacagtgcaggggaaagaatagtagacataatagcaacagacatacaaactaaag

SEQ ID NO: 19962 - DNA, 301 bp, Artificial Sequence
  Wrn.1_NTC.16
  crRNA array
  misc_feature (148)..(157): n is a, c, g, or t
cttggctttatatatcttgtggaaaggacgaaacaccgtaatttctactaagtgtagatgcaaaccactcgggtaattttaatttctactaagtgtagatcggtacgttagacgaaaatttaatttctactaagtgtagatttttttnnnnnnnnnnaagcttggcgtggatccgatatcaactagatcttgagacaaatggcagtattcatccacaattttaaaagaaaaggggggattggggggtacagtgcaggggaaagaatagtagacataatagcaacagacatacaaactaaag

SEQ ID NO: 19963 - DNA, 301 bp, Artificial Sequence
  Wrn.1_NTC.17
  crRNA array
  misc_feature (148)..(157): n is a, c, g, or t
cttggctttatatatcttgtggaaaggacgaaacaccgtaatttctactaagtgtagatgcaaaccactcgggtaattttaatttctactaagtgtagattatcgaacgctatcgaacgttaatttctactaagtgtagatttttttnnnnnnnnnnaagcttggcgtggatccgatatcaactagatcttgagacaaatggcagtattcatccacaattttaaaagaaaaggggggattggggggtacagtgcaggggaaagaatagtagacataatagcaacagacatacaaactaaag

SEQ ID NO: 19964 - DNA, 301 bp, Artificial Sequence
  Wrn.1_NTC.18
  crRNA array
  misc_feature (148)..(157): n is a, c, g, or t
cttggctttatatatcttgtggaaaggacgaaacaccgtaatttctactaagtgtagatgcaaaccactcgggtaattttaatttctactaagtgtagattccggttacgaccggcaaaataatttctactaagtgtagatttttttnnnnnnnnnnaagcttggcgtggatccgatatcaactagatcttgagacaaatggcagtattcatccacaattttaaaagaaaaggggggattggggggtacagtgcaggggaaagaatagtagacataatagcaacagacatacaaactaaag

SEQ ID NO: 19965 - DNA, 301 bp, Artificial Sequence
  Wrn.1_NTC.19
  crRNA array
  misc_feature (148)..(157): n is a, c, g, or t
cttggctttatatatcttgtggaaaggacgaaacaccgtaatttctactaagtgtagatgcaaaccactcgggtaattttaatttctactaagtgtagatcgtcgtagaacgatacccgataatttctactaagtgtagatttttttnnnnnnnnnnaagcttggcgtggatccgatatcaactagatcttgagacaaatggcagtattcatccacaattttaaaagaaaaggggggattggggggtacagtgcaggggaaagaatagtagacataatagcaacagacatacaaactaaag

SEQ ID NO: 19966 - DNA, 301 bp, Artificial Sequence
  Wrn.1_NTC.2
  crRNA array
  misc_feature (148)..(157): n is a, c, g, or t
cttggctttatatatcttgtggaaaggacgaaacaccgtaatttctactaagtgtagatgcaaaccactcgggtaattttaatttctactaagtgtagatttatgtcgcgccgcgacccgtaatttctactaagtgtagatttttttnnnnnnnnnnaagcttggcgtggatccgatatcaactagatcttgagacaaatggcagtattcatccacaattttaaaagaaaaggggggattggggggtacagtgcaggggaaagaatagtagacataatagcaacagacatacaaactaaag

SEQ ID NO: 19967 - DNA, 301 bp, Artificial Sequence
  Wrn.1_NTC.20
  crRNA array
  misc_feature (148)..(157): n is a, c, g, or t
cttggctttatatatcttgtggaaaggacgaaacaccgtaatttctactaagtgtagatgcaaaccactcgggtaattttaatttctactaagtgtagatattccggcgcgaccagaagataatttctactaagtgtagatttttttnnnnnnnnnnaagcttggcgtggatccgatatcaactagatcttgagacaaatggcagtattcatccacaattttaaaagaaaaggggggattggggggtacagtgcaggggaaagaatagtagacataatagcaacagacatacaaactaaag

SEQ ID NO: 19968 - DNA, 301 bp, Artificial Sequence
  Wrn.1_NTC.21
  crRNA array
  misc_feature (148)..(157): n is a, c, g, or t
cttggctttatatatcttgtggaaaggacgaaacaccgtaatttctactaagtgtagatgcaaaccactcgggtaattttaatttctactaagtgtagatgtataacttcgcgcggtccgtaatttctactaagtgtagatttttttnnnnnnnnnnaagcttggcgtggatccgatatcaactagatcttgagacaaatggcagtattcatccacaattttaaaagaaaaggggggattggggggtacagtgcaggggaaagaatagtagacataatagcaacagacatacaaactaaag

SEQ ID NO: 19969 - DNA, 301 bp, Artificial Sequence
  Wrn.1_NTC.22
  crRNA array
  misc_feature (148)..(157): n is a, c, g, or t
cttggctttatatatcttgtggaaaggacgaaacaccgtaatttctactaagtgtagatgcaaaccactcgggtaattttaatttctactaagtgtagatgcgcgtcaacgtaatgtgcctaatttctactaagtgtagatttttttnnnnnnnnnnaagcttggcgtggatccgatatcaactagatcttgagacaaatggcagtattcatccacaattttaaaagaaaaggggggattggggggtacagtgcaggggaaagaatagtagacataatagcaacagacatacaaactaaag

SEQ ID NO: 19970 - DNA, 301 bp, Artificial Sequence
  Wrn.1_NTC.23
  crRNA array
  misc_feature (148)..(157): n is a, c, g, or t
cttggctttatatatcttgtggaaaggacgaaacaccgtaatttctactaagtgtagatgcaaaccactcgggtaattttaatttctactaagtgtagatacgcgctattatcgtaggtgtaatttctactaagtgtagatttttttnnnnnnnnnnaagcttggcgtggatccgatatcaactagatcttgagacaaatggcagtattcatccacaattttaaaagaaaaggggggattggggggtacagtgcaggggaaagaatagtagacataatagcaacagacatacaaactaaag

SEQ ID NO: 19971 - DNA, 301 bp, Artificial Sequence
  Wrn.1_NTC.24
  crRNA array
  misc_feature (148)..(157): n is a, c, g, or t
cttggctttatatatcttgtggaaaggacgaaacaccgtaatttctactaagtgtagatgcaaaccactcgggtaattttaatttctactaagtgtagatactatcgacgttcgtcccggtaatttctactaagtgtagatttttttnnnnnnnnnnaagcttggcgtggatccgatatcaactagatcttgagacaaatggcagtattcatccacaattttaaaagaaaaggggggattggggggtacagtgcaggggaaagaatagtagacataatagcaacagacatacaaactaaag

SEQ ID NO: 19972 - DNA, 301 bp, Artificial Sequence
  Wrn.1_NTC.25
  crRNA array
  misc_feature (148)..(157): n is a, c, g, or t
cttggctttatatatcttgtggaaaggacgaaacaccgtaatttctactaagtgtagatgcaaaccactcgggtaattttaatttctactaagtgtagattcgcgttatcgtgccgtgcgtaatttctactaagtgtagatttttttnnnnnnnnnnaagcttggcgtggatccgatatcaactagatcttgagacaaatggcagtattcatccacaattttaaaagaaaaggggggattggggggtacagtgcaggggaaagaatagtagacataatagcaacagacatacaaactaaag

SEQ ID NO: 19973 - DNA, 301 bp, Artificial Sequence
  Wrn.1_NTC.26
  crRNA array
  misc_feature (148)..(157): n is a, c, g, or t
cttggctttatatatcttgtggaaaggacgaaacaccgtaatttctactaagtgtagatgcaaaccactcgggtaattttaatttctactaagtgtagatcgcgacggcggttttaacactaatttctactaagtgtagatttttttnnnnnnnnnnaagcttggcgtggatccgatatcaactagatcttgagacaaatggcagtattcatccacaattttaaaagaaaaggggggattggggggtacagtgcaggggaaagaatagtagacataatagcaacagacatacaaactaaag

SEQ ID NO: 19974 - DNA, 301 bp, Artificial Sequence
  Wrn.1_NTC.27
  crRNA array
  misc_feature (148)..(157): n is a, c, g, or t
cttggctttatatatcttgtggaaaggacgaaacaccgtaatttctactaagtgtagatgcaaaccactcgggtaattttaatttctactaagtgtagatgtcgcgttgcgaccggcgcttaatttctactaagtgtagatttttttnnnnnnnnnnaagcttggcgtggatccgatatcaactagatcttgagacaaatggcagtattcatccacaattttaaaagaaaaggggggattggggggtacagtgcaggggaaagaatagtagacataatagcaacagacatacaaactaaag

SEQ ID NO: 19975 - DNA, 301 bp, Artificial Sequence
  Wrn.1_NTC.28
  crRNA array
  misc_feature (148)..(157): n is a, c, g, or t
cttggctttatatatcttgtggaaaggacgaaacaccgtaatttctactaagtgtagatgcaaaccactcgggtaattttaatttctactaagtgtagataccgctaatcggcgtaaacttaatttctactaagtgtagatttttttnnnnnnnnnnaagcttggcgtggatccgatatcaactagatcttgagacaaatggcagtattcatccacaattttaaaagaaaaggggggattggggggtacagtgcaggggaaagaatagtagacataatagcaacagacatacaaactaaag

SEQ ID NO: 19976 - DNA, 301 bp, Artificial Sequence
  Wrn.1_NTC.29
  crRNA array
  misc_feature (148)..(157): n is a, c, g, or t
cttggctttatatatcttgtggaaaggacgaaacaccgtaatttctactaagtgtagatgcaaaccactcgggtaattttaatttctactaagtgtagatcgcgatctataccgtctatataatttctactaagtgtagatttttttnnnnnnnnnnaagcttggcgtggatccgatatcaactagatcttgagacaaatggcagtattcatccacaattttaaaagaaaaggggggattggggggtacagtgcaggggaaagaatagtagacataatagcaacagacatacaaactaaag

SEQ ID NO: 19977 - DNA, 301 bp, Artificial Sequence
  Wrn.1_NTC.3
  crRNA array
  misc_feature (148)..(157): n is a, c, g, or t
cttggctttatatatcttgtggaaaggacgaaacaccgtaatttctactaagtgtagatgcaaaccactcgggtaattttaatttctactaagtgtagattcgacgcgagacgacgtacataatttctactaagtgtagatttttttnnnnnnnnnnaagcttggcgtggatccgatatcaactagatcttgagacaaatggcagtattcatccacaattttaaaagaaaaggggggattggggggtacagtgcaggggaaagaatagtagacataatagcaacagacatacaaactaaag

SEQ ID NO: 19978 - DNA, 301 bp, Artificial Sequence
  Wrn.1_NTC.30
  crRNA array
  misc_feature (148)..(157): n is a, c, g, or t
cttggctttatatatcttgtggaaaggacgaaacaccgtaatttctactaagtgtagatgcaaaccactcgggtaattttaatttctactaagtgtagatcgatcgtacgggtgtcctaataatttctactaagtgtagatttttttnnnnnnnnnnaagcttggcgtggatccgatatcaactagatcttgagacaaatggcagtattcatccacaattttaaaagaaaaggggggattggggggtacagtgcaggggaaagaatagtagacataatagcaacagacatacaaactaaag

SEQ ID NO: 19979 - DNA, 301 bp, Artificial Sequence
  Wrn.1_NTC.31
  crRNA array
  misc_feature (148)..(157): n is a, c, g, or t
cttggctttatatatcttgtggaaaggacgaaacaccgtaatttctactaagtgtagatgcaaaccactcgggtaattttaatttctactaagtgtagatgccgaccgcgtgattgtaggtaatttctactaagtgtagatttttttnnnnnnnnnnaagcttggcgtggatccgatatcaactagatcttgagacaaatggcagtattcatccacaattttaaaagaaaaggggggattggggggtacagtgcaggggaaagaatagtagacataatagcaacagacatacaaactaaag

SEQ ID NO: 19980 - DNA, 301 bp, Artificial Sequence
  Wrn.1_NTC.32
  crRNA array
  misc_feature (148)..(157): n is a, c, g, or t
cttggctttatatatcttgtggaaaggacgaaacaccgtaatttctactaagtgtagatgcaaaccactcgggtaattttaatttctactaagtgtagatgcacgttacgcccgggtcactaatttctactaagtgtagatttttttnnnnnnnnnnaagcttggcgtggatccgatatcaactagatcttgagacaaatggcagtattcatccacaattttaaaagaaaaggggggattggggggtacagtgcaggggaaagaatagtagacataatagcaacagacatacaaactaaag

SEQ ID NO: 19981 - DNA, 301 bp, Artificial Sequence
  Wrn.1_NTC.33
  crRNA array
  misc_feature (148)..(157): n is a, c, g, or t
cttggctttatatatcttgtggaaaggacgaaacaccgtaatttctactaagtgtagatgcaaaccactcgggtaattttaatttctactaagtgtagattaagcgaccgacgcattcgctaatttctactaagtgtagatttttttnnnnnnnnnnaagcttggcgtggatccgatatcaactagatcttgagacaaatggcagtattcatccacaattttaaaagaaaaggggggattggggggtacagtgcaggggaaagaatagtagacataatagcaacagacatacaaactaaag

SEQ ID NO: 19982 - DNA, 301 bp, Artificial Sequence
  Wrn.1_NTC.34
  crRNA array
  misc_feature (148)..(157): n is a, c, g, or t
cttggctttatatatcttgtggaaaggacgaaacaccgtaatttctactaagtgtagatgcaaaccactcgggtaattttaatttctactaagtgtagattagcgttcgacacgtgaaactaatttctactaagtgtagatttttttnnnnnnnnnnaagcttggcgtggatccgatatcaactagatcttgagacaaatggcagtattcatccacaattttaaaagaaaaggggggattggggggtacagtgcaggggaaagaatagtagacataatagcaacagacatacaaactaaag

SEQ ID NO: 19983 - DNA, 301 bp, Artificial Sequence
  Wrn.1_NTC.35
  crRNA array
  misc_feature (148)..(157): n is a, c, g, or t
cttggctttatatatcttgtggaaaggacgaaacaccgtaatttctactaagtgtagatgcaaaccactcgggtaattttaatttctactaagtgtagattggcgcgtaatcgctattcgtaatttctactaagtgtagatttttttnnnnnnnnnnaagcttggcgtggatccgatatcaactagatcttgagacaaatggcagtattcatccacaattttaaaagaaaaggggggattggggggtacagtgcaggggaaagaatagtagacataatagcaacagacatacaaactaaag

SEQ ID NO: 19984 - DNA, 301 bp, Artificial Sequence
  Wrn.1_NTC.36
  crRNA array
  misc_feature (148)..(157): n is a, c, g, or t
cttggctttatatatcttgtggaaaggacgaaacaccgtaatttctactaagtgtagatgcaaaccactcgggtaattttaatttctactaagtgtagatcaacccgccgtagcgggccttaatttctactaagtgtagatttttttnnnnnnnnnnaagcttggcgtggatccgatatcaactagatcttgagacaaatggcagtattcatccacaattttaaaagaaaaggggggattggggggtacagtgcaggggaaagaatagtagacataatagcaacagacatacaaactaaag

SEQ ID NO: 19985 - DNA, 301 bp, Artificial Sequence
  Wrn.1_NTC.37
  crRNA array
  misc_feature (148)..(157): n is a, c, g, or t
cttggctttatatatcttgtggaaaggacgaaacaccgtaatttctactaagtgtagatgcaaaccactcgggtaattttaatttctactaagtgtagattttgcgttgacgcgattacttaatttctactaagtgtagatttttttnnnnnnnnnnaagcttggcgtggatccgatatcaactagatcttgagacaaatggcagtattcatccacaattttaaaagaaaaggggggattggggggtacagtgcaggggaaagaatagtagacataatagcaacagacatacaaactaaag

SEQ ID NO: 19986 - DNA, 301 bp, Artificial Sequence
  Wrn.1_NTC.38
  crRNA array
  misc_feature (148)..(157): n is a, c, g, or t
cttggctttatatatcttgtggaaaggacgaaacaccgtaatttctactaagtgtagatgcaaaccactcgggtaattttaatttctactaagtgtagataacggagcgcgatactaccataatttctactaagtgtagatttttttnnnnnnnnnnaagcttggcgtggatccgatatcaactagatcttgagacaaatggcagtattcatccacaattttaaaagaaaaggggggattggggggtacagtgcaggggaaagaatagtagacataatagcaacagacatacaaactaaag

SEQ ID NO: 19987 - DNA, 301 bp, Artificial Sequence
  Wrn.1_NTC.39
  crRNA array
  misc_feature (148)..(157): n is a, c, g, or t
cttggctttatatatcttgtggaaaggacgaaacaccgtaatttctactaagtgtagatgcaaaccactcgggtaattttaatttctactaagtgtagatccggacgttataacgtttcttaatttctactaagtgtagatttttttnnnnnnnnnnaagcttggcgtggatccgatatcaactagatcttgagacaaatggcagtattcatccacaattttaaaagaaaaggggggattggggggtacagtgcaggggaaagaatagtagacataatagcaacagacatacaaactaaag

SEQ ID NO: 19988 - DNA, 301 bp, Artificial Sequence
  Wrn.1_NTC.4
  crRNA array
  misc_feature (148)..(157): n is a, c, g, or t
cttggctttatatatcttgtggaaaggacgaaacaccgtaatttctactaagtgtagatgcaaaccactcgggtaattttaatttctactaagtgtagatatacccgtcgcgaacgtgagtaatttctactaagtgtagatttttttnnnnnnnnnnaagcttggcgtggatccgatatcaactagatcttgagacaaatggcagtattcatccacaattttaaaagaaaaggggggattggggggtacagtgcaggggaaagaatagtagacataatagcaacagacatacaaactaaag

SEQ ID NO: 19989 - DNA, 301 bp, Artificial Sequence
  Wrn.1_NTC.40
  crRNA array
  misc_feature (148)..(157): n is a, c, g, or t
cttggctttatatatcttgtggaaaggacgaaacaccgtaatttctactaagtgtagatgcaaaccactcgggtaattttaatttctactaagtgtagatattcgcgaacccggccggaataatttctactaagtgtagatttttttnnnnnnnnnnaagcttggcgtggatccgatatcaactagatcttgagacaaatggcagtattcatccacaattttaaaagaaaaggggggattggggggtacagtgcaggggaaagaatagtagacataatagcaacagacatacaaactaaag

SEQ ID NO: 19990 - DNA, 301 bp, Artificial Sequence
  Wrn.1_NTC.41
  crRNA array
  misc_feature (148)..(157): n is a, c, g, or t
cttggctttatatatcttgtggaaaggacgaaacaccgtaatttctactaagtgtagatgcaaaccactcgggtaattttaatttctactaagtgtagatttgatggcgcgacgcgttattaatttctactaagtgtagatttttttnnnnnnnnnnaagcttggcgtggatccgatatcaactagatcttgagacaaatggcagtattcatccacaattttaaaagaaaaggggggattggggggtacagtgcaggggaaagaatagtagacataatagcaacagacatacaaactaaag

SEQ ID NO: 19991 - DNA, 301 bp, Artificial Sequence
  Wrn.1_NTC.42
  crRNA array
  misc_feature (148)..(157): n is a, c, g, or t
cttggctttatatatcttgtggaaaggacgaaacaccgtaatttctactaagtgtagatgcaaaccactcgggtaattttaatttctactaagtgtagatggtcaaatcgcggcgataactaatttctactaagtgtagatttttttnnnnnnnnnnaagcttggcgtggatccgatatcaactagatcttgagacaaatggcagtattcatccacaattttaaaagaaaaggggggattggggggtacagtgcaggggaaagaatagtagacataatagcaacagacatacaaactaaag

SEQ ID NO: 19992 - DNA, 301 bp, Artificial Sequence
  Wrn.1_NTC.43
  crRNA array
  misc_feature (148)..(157): n is a, c, g, or t
cttggctttatatatcttgtggaaaggacgaaacaccgtaatttctactaagtgtagatgcaaaccactcgggtaattttaatttctactaagtgtagatcgactcgcgcattgaactggtaatttctactaagtgtagatttttttnnnnnnnnnnaagcttggcgtggatccgatatcaactagatcttgagacaaatggcagtattcatccacaattttaaaagaaaaggggggattggggggtacagtgcaggggaaagaatagtagacataatagcaacagacatacaaactaaag

SEQ ID NO: 19993 - DNA, 301 bp, Artificial Sequence
  Wrn.1_NTC.44
  crRNA array
  misc_feature (148)..(157): n is a, c, g, or t
cttggctttatatatcttgtggaaaggacgaaacaccgtaatttctactaagtgtagatgcaaaccactcgggtaattttaatttctactaagtgtagatagcgtcgtacgatttatcgttaatttctactaagtgtagatttttttnnnnnnnnnnaagcttggcgtggatccgatatcaactagatcttgagacaaatggcagtattcatccacaattttaaaagaaaaggggggattggggggtacagtgcaggggaaagaatagtagacataatagcaacagacatacaaactaaag

SEQ ID NO: 19994 - DNA, 301 bp, Artificial Sequence
  Wrn.1_NTC.45
  crRNA array
  misc_feature (148)..(157): n is a, c, g, or t
cttggctttatatatcttgtggaaaggacgaaacaccgtaatttctactaagtgtagatgcaaaccactcgggtaattttaatttctactaagtgtagatcggaacgcgtgatactagggtaatttctactaagtgtagatttttttnnnnnnnnnnaagcttggcgtggatccgatatcaactagatcttgagacaaatggcagtattcatccacaattttaaaagaaaaggggggattggggggtacagtgcaggggaaagaatagtagacataatagcaacagacatacaaactaaag

SEQ ID NO: 19995 - DNA, 301 bp, Artificial Sequence
  Wrn.1_NTC.46
  crRNA array
  misc_feature (148)..(157): n is a, c, g, or t
cttggctttatatatcttgtggaaaggacgaaacaccgtaatttctactaagtgtagatgcaaaccactcgggtaattttaatttctactaagtgtagatagcgggtcgtagacgcgcggtaatttctactaagtgtagatttttttnnnnnnnnnnaagcttggcgtggatccgatatcaactagatcttgagacaaatggcagtattcatccacaattttaaaagaaaaggggggattggggggtacagtgcaggggaaagaatagtagacataatagcaacagacatacaaactaaag

SEQ ID NO: 19996 - DNA, 301 bp, Artificial Sequence
  Wrn.1_NTC.47
  crRNA array
  misc_feature (148)..(157): n is a, c, g, or t
cttggctttatatatcttgtggaaaggacgaaacaccgtaatttctactaagtgtagatgcaaaccactcgggtaattttaatttctactaagtgtagattctcgtatcgcgattgttaataatttctactaagtgtagatttttttnnnnnnnnnnaagcttggcgtggatccgatatcaactagatcttgagacaaatggcagtattcatccacaattttaaaagaaaaggggggattggggggtacagtgcaggggaaagaatagtagacataatagcaacagacatacaaactaaag

SEQ ID NO: 19997 - DNA, 301 bp, Artificial Sequence
  Wrn.1_NTC.48
  crRNA array
  misc_feature (148)..(157): n is a, c, g, or t
cttggctttatatatcttgtggaaaggacgaaacaccgtaatttctactaagtgtagatgcaaaccactcgggtaattttaatttctactaagtgtagatcggtcgactacggctgttagtaatttctactaagtgtagatttttttnnnnnnnnnnaagcttggcgtggatccgatatcaactagatcttgagacaaatggcagtattcatccacaattttaaaagaaaaggggggattggggggtacagtgcaggggaaagaatagtagacataatagcaacagacatacaaactaaag

SEQ ID NO: 19998 - DNA, 301 bp, Artificial Sequence
  Wrn.1_NTC.49
  crRNA array
  misc_feature (148)..(157): n is a, c, g, or t
cttggctttatatatcttgtggaaaggacgaaacaccgtaatttctactaagtgtagatgcaaaccactcgggtaattttaatttctactaagtgtagattcggggcgcgtcaactgaattaatttctactaagtgtagatttttttnnnnnnnnnnaagcttggcgtggatccgatatcaactagatcttgagacaaatggcagtattcatccacaattttaaaagaaaaggggggattggggggtacagtgcaggggaaagaatagtagacataatagcaacagacatacaaactaaag

SEQ ID NO: 19999 - DNA, 301 bp, Artificial Sequence
  Wrn.1_NTC.5
  crRNA array
  misc_feature (148)..(157): n is a, c, g, or t
cttggctttatatatcttgtggaaaggacgaaacaccgtaatttctactaagtgtagatgcaaaccactcgggtaattttaatttctactaagtgtagatgcttacgcgtcgcgaatgtataatttctactaagtgtagatttttttnnnnnnnnnnaagcttggcgtggatccgatatcaactagatcttgagacaaatggcagtattcatccacaattttaaaagaaaaggggggattggggggtacagtgcaggggaaagaatagtagacataatagcaacagacatacaaactaaag

SEQ ID NO: 20000 - DNA, 301 bp, Artificial Sequence
  Wrn.1_NTC.50
  crRNA array
  misc_feature (148)..(157): n is a, c, g, or t
cttggctttatatatcttgtggaaaggacgaaacaccgtaatttctactaagtgtagatgcaaaccactcgggtaattttaatttctactaagtgtagatattgccgctcgcgcaaaatctaatttctactaagtgtagatttttttnnnnnnnnnnaagcttggcgtggatccgatatcaactagatcttgagacaaatggcagtattcatccacaattttaaaagaaaaggggggattggggggtacagtgcaggggaaagaatagtagacataatagcaacagacatacaaactaaag

SEQ ID NO: 20001 - DNA, 301 bp, Artificial Sequence
  Wrn.1_NTC.51
  crRNA array
  misc_feature (148)..(157): n is a, c, g, or t
cttggctttatatatcttgtggaaaggacgaaacaccgtaatttctactaagtgtagatgcaaaccactcgggtaattttaatttctactaagtgtagattaacgcgcaacacgccaatgtaatttctactaagtgtagatttttttnnnnnnnnnnaagcttggcgtggatccgatatcaactagatcttgagacaaatggcagtattcatccacaattttaaaagaaaaggggggattggggggtacagtgcaggggaaagaatagtagacataatagcaacagacatacaaactaaag

SEQ ID NO: 20002 - DNA, 301 bp, Artificial Sequence
  Wrn.1_NTC.6
  crRNA array
  misc_feature (148)..(157): n is a, c, g, or t
cttggctttatatatcttgtggaaaggacgaaacaccgtaatttctactaagtgtagatgcaaaccactcgggtaattttaatttctactaagtgtagatcgaatcgcgcctacgggaattaatttctactaagtgtagatttttttnnnnnnnnnnaagcttggcgtggatccgatatcaactagatcttgagacaaatggcagtattcatccacaattttaaaagaaaaggggggattggggggtacagtgcaggggaaagaatagtagacataatagcaacagacatacaaactaaag

SEQ ID NO: 20003 - DNA, 301 bp, Artificial Sequence
  Wrn.1_NTC.7
  crRNA array
  misc_feature (148)..(157): n is a, c, g, or t
cttggctttatatatcttgtggaaaggacgaaacaccgtaatttctactaagtgtagatgcaaaccactcgggtaattttaatttctactaagtgtagatcgccgaacggataagactattaatttctactaagtgtagatttttttnnnnnnnnnnaagcttggcgtggatccgatatcaactagatcttgagacaaatggcagtattcatccacaattttaaaagaaaaggggggattggggggtacagtgcaggggaaagaatagtagacataatagcaacagacatacaaactaaag

SEQ ID NO: 20004 - DNA, 301 bp, Artificial Sequence
  Wrn.1_NTC.8
  crRNA array
  misc_feature (148)..(157): n is a, c, g, or t
cttggctttatatatcttgtggaaaggacgaaacaccgtaatttctactaagtgtagatgcaaaccactcgggtaattttaatttctactaagtgtagatcgaccgaggttacgctgggataatttctactaagtgtagatttttttnnnnnnnnnnaagcttggcgtggatccgatatcaactagatcttgagacaaatggcagtattcatccacaattttaaaagaaaaggggggattggggggtacagtgcaggggaaagaatagtagacataatagcaacagacatacaaactaaag

SEQ ID NO: 20005 - DNA, 301 bp, Artificial Sequence
  Wrn.1_NTC.9
  crRNA array
  misc_feature (148)..(157): n is a, c, g, or t
cttggctttatatatcttgtggaaaggacgaaacaccgtaatttctactaagtgtagatgcaaaccactcgggtaattttaatttctactaagtgtagatatcgccgtacggctatggcataatttctactaagtgtagatttttttnnnnnnnnnnaagcttggcgtggatccgatatcaactagatcttgagacaaatggcagtattcatccacaattttaaaagaaaaggggggattggggggtacagtgcaggggaaagaatagtagacataatagcaacagacatacaaactaaag

SEQ ID NO: 20006 - DNA, 301 bp, Artificial Sequence
  Wrn.2_NTC.0
  crRNA array
  misc_feature (148)..(157): n is a, c, g, or t
cttggctttatatatcttgtggaaaggacgaaacaccgtaatttctactaagtgtagatgccatgtccagcagaacctttaatttctactaagtgtagattatagcgtcgcgcgctaatttaatttctactaagtgtagatttttttnnnnnnnnnnaagcttggcgtggatccgatatcaactagatcttgagacaaatggcagtattcatccacaattttaaaagaaaaggggggattggggggtacagtgcaggggaaagaatagtagacataatagcaacagacatacaaactaaag

SEQ ID NO: 20007 - DNA, 301 bp, Artificial Sequence
  Wrn.2_NTC.1
  crRNA array
  misc_feature (148)..(157): n is a, c, g, or t
cttggctttatatatcttgtggaaaggacgaaacaccgtaatttctactaagtgtagatgccatgtccagcagaacctttaatttctactaagtgtagatcgcgtaaccgttccggctcctaatttctactaagtgtagatttttttnnnnnnnnnnaagcttggcgtggatccgatatcaactagatcttgagacaaatggcagtattcatccacaattttaaaagaaaaggggggattggggggtacagtgcaggggaaagaatagtagacataatagcaacagacatacaaactaaag

SEQ ID NO: 20008 - DNA, 301 bp, Artificial Sequence
  Wrn.2_NTC.10
  crRNA array
  misc_feature (148)..(157): n is a, c, g, or t
cttggctttatatatcttgtggaaaggacgaaacaccgtaatttctactaagtgtagatgccatgtccagcagaacctttaatttctactaagtgtagatcgctaagttcgcgcgggccgtaatttctactaagtgtagatttttttnnnnnnnnnnaagcttggcgtggatccgatatcaactagatcttgagacaaatggcagtattcatccacaattttaaaagaaaaggggggattggggggtacagtgcaggggaaagaatagtagacataatagcaacagacatacaaactaaag

SEQ ID NO: 20009 - DNA, 301 bp, Artificial Sequence
  Wrn.2_NTC.11
  crRNA array
  misc_feature (148)..(157): n is a, c, g, or t
cttggctttatatatcttgtggaaaggacgaaacaccgtaatttctactaagtgtagatgccatgtccagcagaacctttaatttctactaagtgtagatcgttcgtcgacgaagcaatctaatttctactaagtgtagatttttttnnnnnnnnnnaagcttggcgtggatccgatatcaactagatcttgagacaaatggcagtattcatccacaattttaaaagaaaaggggggattggggggtacagtgcaggggaaagaatagtagacataatagcaacagacatacaaactaaag

SEQ ID NO: 20010 - DNA, 301 bp, Artificial Sequence
  Wrn.2_NTC.12
  crRNA array
  misc_feature (148)..(157): n is a, c, g, or t
cttggctttatatatcttgtggaaaggacgaaacaccgtaatttctactaagtgtagatgccatgtccagcagaacctttaatttctactaagtgtagatcgccgacgattaatcaatagtaatttctactaagtgtagatttttttnnnnnnnnnnaagcttggcgtggatccgatatcaactagatcttgagacaaatggcagtattcatccacaattttaaaagaaaaggggggattggggggtacagtgcaggggaaagaatagtagacataatagcaacagacatacaaactaaag

SEQ ID NO: 20011 - DNA, 301 bp, Artificial Sequence
  Wrn.2_NTC.13
  crRNA array
  misc_feature (148)..(157): n is a, c, g, or t
cttggctttatatatcttgtggaaaggacgaaacaccgtaatttctactaagtgtagatgccatgtccagcagaacctttaatttctactaagtgtagatgaccgttgtatcgcgatcaataatttctactaagtgtagatttttttnnnnnnnnnnaagcttggcgtggatccgatatcaactagatcttgagacaaatggcagtattcatccacaattttaaaagaaaaggggggattggggggtacagtgcaggggaaagaatagtagacataatagcaacagacatacaaactaaag

SEQ ID NO: 20012 - DNA, 301 bp, Artificial Sequence
  Wrn.2_NTC.14
  crRNA array
  misc_feature (148)..(157): n is a, c, g, or t
cttggctttatatatcttgtggaaaggacgaaacaccgtaatttctactaagtgtagatgccatgtccagcagaacctttaatttctactaagtgtagatccgttcgtgcgatagtgttttaatttctactaagtgtagatttttttnnnnnnnnnnaagcttggcgtggatccgatatcaactagatcttgagacaaatggcagtattcatccacaattttaaaagaaaaggggggattggggggtacagtgcaggggaaagaatagtagacataatagcaacagacatacaaactaaag

SEQ ID NO: 20013 - DNA, 301 bp, Artificial Sequence
  Wrn.2_NTC.15
  crRNA array
  misc_feature (148)..(157): n is a, c, g, or t
cttggctttatatatcttgtggaaaggacgaaacaccgtaatttctactaagtgtagatgccatgtccagcagaacctttaatttctactaagtgtagatgttgtcgtgccgcgaatttataatttctactaagtgtagatttttttnnnnnnnnnnaagcttggcgtggatccgatatcaactagatcttgagacaaatggcagtattcatccacaattttaaaagaaaaggggggattggggggtacagtgcaggggaaagaatagtagacataatagcaacagacatacaaactaaag

SEQ ID NO: 20014 - DNA, 301 bp, Artificial Sequence
  Wrn.2_NTC.16
  crRNA array
  misc_feature (148)..(157): n is a, c, g, or t
cttggctttatatatcttgtggaaaggacgaaacaccgtaatttctactaagtgtagatgccatgtccagcagaacctttaatttctactaagtgtagatcggtacgttagacgaaaatttaatttctactaagtgtagatttttttnnnnnnnnnnaagcttggcgtggatccgatatcaactagatcttgagacaaatggcagtattcatccacaattttaaaagaaaaggggggattggggggtacagtgcaggggaaagaatagtagacataatagcaacagacatacaaactaaag

SEQ ID NO: 20015 - DNA, 301 bp, Artificial Sequence
  Wrn.2_NTC.17
  crRNA array
  misc_feature (148)..(157): n is a, c, g, or t
cttggctttatatatcttgtggaaaggacgaaacaccgtaatttctactaagtgtagatgccatgtccagcagaacctttaatttctactaagtgtagattatcgaacgctatcgaacgttaatttctactaagtgtagatttttttnnnnnnnnnnaagcttggcgtggatccgatatcaactagatcttgagacaaatggcagtattcatccacaattttaaaagaaaaggggggattggggggtacagtgcaggggaaagaatagtagacataatagcaacagacatacaaactaaag

SEQ ID NO: 20016 - DNA, 301 bp, Artificial Sequence
  Wrn.2_NTC.18
  crRNA array
  misc_feature (148)..(157): n is a, c, g, or t
cttggctttatatatcttgtggaaaggacgaaacaccgtaatttctactaagtgtagatgccatgtccagcagaacctttaatttctactaagtgtagattccggttacgaccggcaaaataatttctactaagtgtagatttttttnnnnnnnnnnaagcttggcgtggatccgatatcaactagatcttgagacaaatggcagtattcatccacaattttaaaagaaaaggggggattggggggtacagtgcaggggaaagaatagtagacataatagcaacagacatacaaactaaag

SEQ ID NO: 20017 - DNA, 301 bp, Artificial Sequence
  Wrn.2_NTC.19
  crRNA array
  misc_feature (148)..(157): n is a, c, g, or t
cttggctttatatatcttgtggaaaggacgaaacaccgtaatttctactaagtgtagatgccatgtccagcagaacctttaatttctactaagtgtagatcgtcgtagaacgatacccgataatttctactaagtgtagatttttttnnnnnnnnnnaagcttggcgtggatccgatatcaactagatcttgagacaaatggcagtattcatccacaattttaaaagaaaaggggggattggggggtacagtgcaggggaaagaatagtagacataatagcaacagacatacaaactaaag

SEQ ID NO: 20018 - DNA, 301 bp, Artificial Sequence
  Wrn.2_NTC.2
  crRNA array
  misc_feature (148)..(157): n is a, c, g, or t
cttggctttatatatcttgtggaaaggacgaaacaccgtaatttctactaagtgtagatgccatgtccagcagaacctttaatttctactaagtgtagatttatgtcgcgccgcgacccgtaatttctactaagtgtagatttttttnnnnnnnnnnaagcttggcgtggatccgatatcaactagatcttgagacaaatggcagtattcatccacaattttaaaagaaaaggggggattggggggtacagtgcaggggaaagaatagtagacataatagcaacagacatacaaactaaag

SEQ ID NO: 20019 - DNA, 301 bp, Artificial Sequence
  Wrn.2_NTC.20
  crRNA array
  misc_feature (148)..(157): n is a, c, g, or t
cttggctttatatatcttgtggaaaggacgaaacaccgtaatttctactaagtgtagatgccatgtccagcagaacctttaatttctactaagtgtagatattccggcgcgaccagaagataatttctactaagtgtagatttttttnnnnnnnnnnaagcttggcgtggatccgatatcaactagatcttgagacaaatggcagtattcatccacaattttaaaagaaaaggggggattggggggtacagtgcaggggaaagaatagtagacataatagcaacagacatacaaactaaag

SEQ ID NO: 20020 - DNA, 301 bp, Artificial Sequence
  Wrn.2_NTC.21
  crRNA array
  misc_feature (148)..(157): n is a, c, g, or t
cttggctttatatatcttgtggaaaggacgaaacaccgtaatttctactaagtgtagatgccatgtccagcagaacctttaatttctactaagtgtagatgtataacttcgcgcggtccgtaatttctactaagtgtagatttttttnnnnnnnnnnaagcttggcgtggatccgatatcaactagatcttgagacaaatggcagtattcatccacaattttaaaagaaaaggggggattggggggtacagtgcaggggaaagaatagtagacataatagcaacagacatacaaactaaag

SEQ ID NO: 20021 - DNA, 301 bp, Artificial Sequence
  Wrn.2_NTC.22
  crRNA array
  misc_feature (148)..(157): n is a, c, g, or t
cttggctttatatatcttgtggaaaggacgaaacaccgtaatttctactaagtgtagatgccatgtccagcagaacctttaatttctactaagtgtagatgcgcgtcaacgtaatgtgcctaatttctactaagtgtagatttttttnnnnnnnnnnaagcttggcgtggatccgatatcaactagatcttgagacaaatggcagtattcatccacaattttaaaagaaaaggggggattggggggtacagtgcaggggaaagaatagtagacataatagcaacagacatacaaactaaag

SEQ ID NO: 20022 - DNA, 301 bp, Artificial Sequence
  Wrn.2_NTC.23
  crRNA array
  misc_feature (148)..(157): n is a, c, g, or t
cttggctttatatatcttgtggaaaggacgaaacaccgtaatttctactaagtgtagatgccatgtccagcagaacctttaatttctactaagtgtagatacgcgctattatcgtaggtgtaatttctactaagtgtagatttttttnnnnnnnnnnaagcttggcgtggatccgatatcaactagatcttgagacaaatggcagtattcatccacaattttaaaagaaaaggggggattggggggtacagtgcaggggaaagaatagtagacataatagcaacagacatacaaactaaag

SEQ ID NO: 20023 - DNA, 301 bp, Artificial Sequence
  Wrn.2_NTC.24
  crRNA array
  misc_feature (148)..(157): n is a, c, g, or t
cttggctttatatatcttgtggaaaggacgaaacaccgtaatttctactaagtgtagatgccatgtccagcagaacctttaatttctactaagtgtagatactatcgacgttcgtcccggtaatttctactaagtgtagatttttttnnnnnnnnnnaagcttggcgtggatccgatatcaactagatcttgagacaaatggcagtattcatccacaattttaaaagaaaaggggggattggggggtacagtgcaggggaaagaatagtagacataatagcaacagacatacaaactaaag

SEQ ID NO: 20024 - DNA, 301 bp, Artificial Sequence
  Wrn.2_NTC.25
  crRNA array
  misc_feature (148)..(157): n is a, c, g, or t
cttggctttatatatcttgtggaaaggacgaaacaccgtaatttctactaagtgtagatgccatgtccagcagaacctttaatttctactaagtgtagattcgcgttatcgtgccgtgcgtaatttctactaagtgtagatttttttnnnnnnnnnnaagcttggcgtggatccgatatcaactagatcttgagacaaatggcagtattcatccacaattttaaaagaaaaggggggattggggggtacagtgcaggggaaagaatagtagacataatagcaacagacatacaaactaaag

SEQ ID NO: 20025 - DNA, 301 bp, Artificial Sequence
  Wrn.2_NTC.26
  crRNA array
  misc_feature (148)..(157): n is a, c, g, or t
cttggctttatatatcttgtggaaaggacgaaacaccgtaatttctactaagtgtagatgccatgtccagcagaacctttaatttctactaagtgtagatcgcgacggcggttttaacactaatttctactaagtgtagatttttttnnnnnnnnnnaagcttggcgtggatccgatatcaactagatcttgagacaaatggcagtattcatccacaattttaaaagaaaaggggggattggggggtacagtgcaggggaaagaatagtagacataatagcaacagacatacaaactaaag

SEQ ID NO: 20026 - DNA, 301 bp, Artificial Sequence
  Wrn.2_NTC.27
  crRNA array
  misc_feature (148)..(157): n is a, c, g, or t
cttggctttatatatcttgtggaaaggacgaaacaccgtaatttctactaagtgtagatgccatgtccagcagaacctttaatttctactaagtgtagatgtcgcgttgcgaccggcgcttaatttctactaagtgtagatttttttnnnnnnnnnnaagcttggcgtggatccgatatcaactagatcttgagacaaatggcagtattcatccacaattttaaaagaaaaggggggattggggggtacagtgcaggggaaagaatagtagacataatagcaacagacatacaaactaaag

SEQ ID NO: 20027 - DNA, 301 bp, Artificial Sequence
  Wrn.2_NTC.28
  crRNA array
  misc_feature (148)..(157): n is a, c, g, or t
cttggctttatatatcttgtggaaaggacgaaacaccgtaatttctactaagtgtagatgccatgtccagcagaacctttaatttctactaagtgtagataccgctaatcggcgtaaacttaatttctactaagtgtagatttttttnnnnnnnnnnaagcttggcgtggatccgatatcaactagatcttgagacaaatggcagtattcatccacaattttaaaagaaaaggggggattggggggtacagtgcaggggaaagaatagtagacataatagcaacagacatacaaactaaag

SEQ ID NO: 20028 - DNA, 301 bp, Artificial Sequence
  Wrn.2_NTC.29
  crRNA array
  misc_feature (148)..(157): n is a, c, g, or t
cttggctttatatatcttgtggaaaggacgaaacaccgtaatttctactaagtgtagatgccatgtccagcagaacctttaatttctactaagtgtagatcgcgatctataccgtctatataatttctactaagtgtagatttttttnnnnnnnnnnaagcttggcgtggatccgatatcaactagatcttgagacaaatggcagtattcatccacaattttaaaagaaaaggggggattggggggtacagtgcaggggaaagaatagtagacataatagcaacagacatacaaactaaag

SEQ ID NO: 20029 - DNA, 301 bp, Artificial Sequence
  Wrn.2_NTC.3
  crRNA array
  misc_feature (148)..(157): n is a, c, g, or t
cttggctttatatatcttgtggaaaggacgaaacaccgtaatttctactaagtgtagatgccatgtccagcagaacctttaatttctactaagtgtagattcgacgcgagacgacgtacataatttctactaagtgtagatttttttnnnnnnnnnnaagcttggcgtggatccgatatcaactagatcttgagacaaatggcagtattcatccacaattttaaaagaaaaggggggattggggggtacagtgcaggggaaagaatagtagacataatagcaacagacatacaaactaaag

SEQ ID NO: 20030 - DNA, 301 bp, Artificial Sequence
  Wrn.2_NTC.30
  crRNA array
  misc_feature (148)..(157): n is a, c, g, or t
cttggctttatatatcttgtggaaaggacgaaacaccgtaatttctactaagtgtagatgccatgtccagcagaacctttaatttctactaagtgtagatcgatcgtacgggtgtcctaataatttctactaagtgtagatttttttnnnnnnnnnnaagcttggcgtggatccgatatcaactagatcttgagacaaatggcagtattcatccacaattttaaaagaaaaggggggattggggggtacagtgcaggggaaagaatagtagacataatagcaacagacatacaaactaaag

SEQ ID NO: 20031 - DNA, 301 bp, Artificial Sequence
  Wrn.2_NTC.31
  crRNA array
  misc_feature (148)..(157): n is a, c, g, or t
cttggctttatatatcttgtggaaaggacgaaacaccgtaatttctactaagtgtagatgccatgtccagcagaacctttaatttctactaagtgtagatgccgaccgcgtgattgtaggtaatttctactaagtgtagatttttttnnnnnnnnnnaagcttggcgtggatccgatatcaactagatcttgagacaaatggcagtattcatccacaattttaaaagaaaaggggggattggggggtacagtgcaggggaaagaatagtagacataatagcaacagacatacaaactaaag

SEQ ID NO: 20032 - DNA, 301 bp, Artificial Sequence
  Wrn.2_NTC.32
  crRNA array
  misc_feature (148)..(157): n is a, c, g, or t
cttggctttatatatcttgtggaaaggacgaaacaccgtaatttctactaagtgtagatgccatgtccagcagaacctttaatttctactaagtgtagatgcacgttacgcccgggtcactaatttctactaagtgtagatttttttnnnnnnnnnnaagcttggcgtggatccgatatcaactagatcttgagacaaatggcagtattcatccacaattttaaaagaaaaggggggattggggggtacagtgcaggggaaagaatagtagacataatagcaacagacatacaaactaaag

SEQ ID NO: 20033 - DNA, 301 bp, Artificial Sequence
  Wrn.2_NTC.33
  crRNA array
  misc_feature (148)..(157): n is a, c, g, or t
cttggctttatatatcttgtggaaaggacgaaacaccgtaatttctactaagtgtagatgccatgtccagcagaacctttaatttctactaagtgtagattaagcgaccgacgcattcgctaatttctactaagtgtagatttttttnnnnnnnnnnaagcttggcgtggatccgatatcaactagatcttgagacaaatggcagtattcatccacaattttaaaagaaaaggggggattggggggtacagtgcaggggaaagaatagtagacataatagcaacagacatacaaactaaag

SEQ ID NO: 20034 - DNA, 301 bp, Artificial Sequence
  Wrn.2_NTC.34
  crRNA array
  misc_feature (148)..(157): n is a, c, g, or t
cttggctttatatatcttgtggaaaggacgaaacaccgtaatttctactaagtgtagatgccatgtccagcagaacctttaatttctactaagtgtagattagcgttcgacacgtgaaactaatttctactaagtgtagatttttttnnnnnnnnnnaagcttggcgtggatccgatatcaactagatcttgagacaaatggcagtattcatccacaattttaaaagaaaaggggggattggggggtacagtgcaggggaaagaatagtagacataatagcaacagacatacaaactaaag

SEQ ID NO: 20035 - DNA, 301 bp, Artificial Sequence
  Wrn.2_NTC.35
  crRNA array
  misc_feature (148)..(157): n is a, c, g, or t
cttggctttatatatcttgtggaaaggacgaaacaccgtaatttctactaagtgtagatgccatgtccagcagaacctttaatttctactaagtgtagattggcgcgtaatcgctattcgtaatttctactaagtgtagatttttttnnnnnnnnnnaagcttggcgtggatccgatatcaactagatcttgagacaaatggcagtattcatccacaattttaaaagaaaaggggggattggggggtacagtgcaggggaaagaatagtagacataatagcaacagacatacaaactaaag

SEQ ID NO: 20036 - DNA, 301 bp, Artificial Sequence
  Wrn.2_NTC.36
  crRNA array
  misc_feature (148)..(157): n is a, c, g, or t
cttggctttatatatcttgtggaaaggacgaaacaccgtaatttctactaagtgtagatgccatgtccagcagaacctttaatttctactaagtgtagatcaacccgccgtagcgggccttaatttctactaagtgtagatttttttnnnnnnnnnnaagcttggcgtggatccgatatcaactagatcttgagacaaatggcagtattcatccacaattttaaaagaaaaggggggattggggggtacagtgcaggggaaagaatagtagacataatagcaacagacatacaaactaaag

SEQ ID NO: 20037 - DNA, 301 bp, Artificial Sequence
  Wrn.2_NTC.37
  crRNA array
  misc_feature (148)..(157): n is a, c, g, or t
cttggctttatatatcttgtggaaaggacgaaacaccgtaatttctactaagtgtagatgccatgtccagcagaacctttaatttctactaagtgtagattttgcgttgacgcgattacttaatttctactaagtgtagatttttttnnnnnnnnnnaagcttggcgtggatccgatatcaactagatcttgagacaaatggcagtattcatccacaattttaaaagaaaaggggggattggggggtacagtgcaggggaaagaatagtagacataatagcaacagacatacaaactaaag

SEQ ID NO: 20038 - DNA, 301 bp, Artificial Sequence
  Wrn.2_NTC.38
  crRNA array
  misc_feature (148)..(157): n is a, c, g, or t
cttggctttatatatcttgtggaaaggacgaaacaccgtaatttctactaagtgtagatgccatgtccagcagaacctttaatttctactaagtgtagataacggagcgcgatactaccataatttctactaagtgtagatttttttnnnnnnnnnnaagcttggcgtggatccgatatcaactagatcttgagacaaatggcagtattcatccacaattttaaaagaaaaggggggattggggggtacagtgcaggggaaagaatagtagacataatagcaacagacatacaaactaaag

SEQ ID NO: 20039 - DNA, 301 bp, Artificial Sequence
  Wrn.2_NTC.39
  crRNA array
  misc_feature (148)..(157): n is a, c, g, or t
cttggctttatatatcttgtggaaaggacgaaacaccgtaatttctactaagtgtagatgccatgtccagcagaacctttaatttctactaagtgtagatccggacgttataacgtttcttaatttctactaagtgtagatttttttnnnnnnnnnnaagcttggcgtggatccgatatcaactagatcttgagacaaatggcagtattcatccacaattttaaaagaaaaggggggattggggggtacagtgcaggggaaagaatagtagacataatagcaacagacatacaaactaaag

SEQ ID NO: 20040 - DNA, 301 bp, Artificial Sequence
  Wrn.2_NTC.4
  crRNA array
  misc_feature (148)..(157): n is a, c, g, or t
cttggctttatatatcttgtggaaaggacgaaacaccgtaatttctactaagtgtagatgccatgtccagcagaacctttaatttctactaagtgtagatatacccgtcgcgaacgtgagtaatttctactaagtgtagatttttttnnnnnnnnnnaagcttggcgtggatccgatatcaactagatcttgagacaaatggcagtattcatccacaattttaaaagaaaaggggggattggggggtacagtgcaggggaaagaatagtagacataatagcaacagacatacaaactaaag

SEQ ID NO: 20041 - DNA, 301 bp, Artificial Sequence
  Wrn.2_NTC.40
  crRNA array
  misc_feature (148)..(157): n is a, c, g, or t
cttggctttatatatcttgtggaaaggacgaaacaccgtaatttctactaagtgtagatgccatgtccagcagaacctttaatttctactaagtgtagatattcgcgaacccggccggaataatttctactaagtgtagatttttttnnnnnnnnnnaagcttggcgtggatccgatatcaactagatcttgagacaaatggcagtattcatccacaattttaaaagaaaaggggggattggggggtacagtgcaggggaaagaatagtagacataatagcaacagacatacaaactaaag

SEQ ID NO: 20042 - DNA, 301 bp, Artificial Sequence
  Wrn.2_NTC.41
  crRNA array
  misc_feature (148)..(157): n is a, c, g, or t
cttggctttatatatcttgtggaaaggacgaaacaccgtaatttctactaagtgtagatgccatgtccagcagaacctttaatttctactaagtgtagatttgatggcgcgacgcgttattaatttctactaagtgtagatttttttnnnnnnnnnnaagcttggcgtggatccgatatcaactagatcttgagacaaatggcagtattcatccacaattttaaaagaaaaggggggattggggggtacagtgcaggggaaagaatagtagacataatagcaacagacatacaaactaaag

SEQ ID NO: 20043 - DNA, 301 bp, Artificial Sequence
  Wrn.2_NTC.42
  crRNA array
  misc_feature (148)..(157): n is a, c, g, or t
cttggctttatatatcttgtggaaaggacgaaacaccgtaatttctactaagtgtagatgccatgtccagcagaacctttaatttctactaagtgtagatggtcaaatcgcggcgataactaatttctactaagtgtagatttttttnnnnnnnnnnaagcttggcgtggatccgatatcaactagatcttgagacaaatggcagtattcatccacaattttaaaagaaaaggggggattggggggtacagtgcaggggaaagaatagtagacataatagcaacagacatacaaactaaag

SEQ ID NO: 20044 - DNA, 301 bp, Artificial Sequence
  Wrn.2_NTC.43
  crRNA array
  misc_feature (148)..(157): n is a, c, g, or t
cttggctttatatatcttgtggaaaggacgaaacaccgtaatttctactaagtgtagatgccatgtccagcagaacctttaatttctactaagtgtagatcgactcgcgcattgaactggtaatttctactaagtgtagatttttttnnnnnnnnnnaagcttggcgtggatccgatatcaactagatcttgagacaaatggcagtattcatccacaattttaaaagaaaaggggggattggggggtacagtgcaggggaaagaatagtagacataatagcaacagacatacaaactaaag

SEQ ID NO: 20045 - DNA, 301 bp, Artificial Sequence
  Wrn.2_NTC.44
  crRNA array
  misc_feature (148)..(157): n is a, c, g, or t
cttggctttatatatcttgtggaaaggacgaaacaccgtaatttctactaagtgtagatgccatgtccagcagaacctttaatttctactaagtgtagatagcgtcgtacgatttatcgttaatttctactaagtgtagatttttttnnnnnnnnnnaagcttggcgtggatccgatatcaactagatcttgagacaaatggcagtattcatccacaattttaaaagaaaaggggggattggggggtacagtgcaggggaaagaatagtagacataatagcaacagacatacaaactaaag

SEQ ID NO: 20046 - DNA, 301 bp, Artificial Sequence
  Wrn.2_NTC.45
  crRNA array
  misc_feature (148)..(157): n is a, c, g, or t
cttggctttatatatcttgtggaaaggacgaaacaccgtaatttctactaagtgtagatgccatgtccagcagaacctttaatttctactaagtgtagatcggaacgcgtgatactagggtaatttctactaagtgtagatttttttnnnnnnnnnnaagcttggcgtggatccgatatcaactagatcttgagacaaatggcagtattcatccacaattttaaaagaaaaggggggattggggggtacagtgcaggggaaagaatagtagacataatagcaacagacatacaaactaaag

SEQ ID NO: 20047 - DNA, 301 bp, Artificial Sequence
  Wrn.2_NTC.46
  crRNA array
  misc_feature (148)..(157): n is a, c, g, or t
cttggctttatatatcttgtggaaaggacgaaacaccgtaatttctactaagtgtagatgccatgtccagcagaacctttaatttctactaagtgtagatagcgggtcgtagacgcgcggtaatttctactaagtgtagatttttttnnnnnnnnnnaagcttggcgtggatccgatatcaactagatcttgagacaaatggcagtattcatccacaattttaaaagaaaaggggggattggggggtacagtgcaggggaaagaatagtagacataatagcaacagacatacaaactaaag

SEQ ID NO: 20048 - DNA, 301 bp, Artificial Sequence
  Wrn.2_NTC.47
  crRNA array
  misc_feature (148)..(157): n is a, c, g, or t
cttggctttatatatcttgtggaaaggacgaaacaccgtaatttctactaagtgtagatgccatgtccagcagaacctttaatttctactaagtgtagattctcgtatcgcgattgttaataatttctactaagtgtagatttttttnnnnnnnnnnaagcttggcgtggatccgatatcaactagatcttgagacaaatggcagtattcatccacaattttaaaagaaaaggggggattggggggtacagtgcaggggaaagaatagtagacataatagcaacagacatacaaactaaag

SEQ ID NO: 20049 - DNA, 301 bp, Artificial Sequence
  Wrn.2_NTC.48
  crRNA array
  misc_feature (148)..(157): n is a, c, g, or t
cttggctttatatatcttgtggaaaggacgaaacaccgtaatttctactaagtgtagatgccatgtccagcagaacctttaatttctactaagtgtagatcggtcgactacggctgttagtaatttctactaagtgtagatttttttnnnnnnnnnnaagcttggcgtggatccgatatcaactagatcttgagacaaatggcagtattcatccacaattttaaaagaaaaggggggattggggggtacagtgcaggggaaagaatagtagacataatagcaacagacatacaaactaaag

SEQ ID NO: 20050 - DNA, 301 bp, Artificial Sequence
  Wrn.2_NTC.49
  crRNA array
  misc_feature (148)..(157): n is a, c, g, or t
cttggctttatatatcttgtggaaaggacgaaacaccgtaatttctactaagtgtagatgccatgtccagcagaacctttaatttctactaagtgtagattcggggcgcgtcaactgaattaatttctactaagtgtagatttttttnnnnnnnnnnaagcttggcgtggatccgatatcaactagatcttgagacaaatggcagtattcatccacaattttaaaagaaaaggggggattggggggtacagtgcaggggaaagaatagtagacataatagcaacagacatacaaactaaag

SEQ ID NO: 20051 - DNA, 301 bp, Artificial Sequence
  Wrn.2_NTC.5
  crRNA array
  misc_feature (148)..(157): n is a, c, g, or t
cttggctttatatatcttgtggaaaggacgaaacaccgtaatttctactaagtgtagatgccatgtccagcagaacctttaatttctactaagtgtagatgcttacgcgtcgcgaatgtataatttctactaagtgtagatttttttnnnnnnnnnnaagcttggcgtggatccgatatcaactagatcttgagacaaatggcagtattcatccacaattttaaaagaaaaggggggattggggggtacagtgcaggggaaagaatagtagacataatagcaacagacatacaaactaaag

SEQ ID NO: 20052 - DNA, 301 bp, Artificial Sequence
  Wrn.2_NTC.50
  crRNA array
  misc_feature (148)..(157): n is a, c, g, or t
cttggctttatatatcttgtggaaaggacgaaacaccgtaatttctactaagtgtagatgccatgtccagcagaacctttaatttctactaagtgtagatattgccgctcgcgcaaaatctaatttctactaagtgtagatttttttnnnnnnnnnnaagcttggcgtggatccgatatcaactagatcttgagacaaatggcagtattcatccacaattttaaaagaaaaggggggattggggggtacagtgcaggggaaagaatagtagacataatagcaacagacatacaaactaaag

SEQ ID NO: 20053 - DNA, 301 bp, Artificial Sequence
  Wrn.2_NTC.51
  crRNA array
  misc_feature (148)..(157): n is a, c, g, or t
cttggctttatatatcttgtggaaaggacgaaacaccgtaatttctactaagtgtagatgccatgtccagcagaacctttaatttctactaagtgtagattaacgcgcaacacgccaatgtaatttctactaagtgtagatttttttnnnnnnnnnnaagcttggcgtggatccgatatcaactagatcttgagacaaatggcagtattcatccacaattttaaaagaaaaggggggattggggggtacagtgcaggggaaagaatagtagacataatagcaacagacatacaaactaaag

SEQ ID NO: 20054 - DNA, 301 bp, Artificial Sequence
  Wrn.2_NTC.6
  crRNA array
  misc_feature (148)..(157): n is a, c, g, or t
cttggctttatatatcttgtggaaaggacgaaacaccgtaatttctactaagtgtagatgccatgtccagcagaacctttaatttctactaagtgtagatcgaatcgcgcctacgggaattaatttctactaagtgtagatttttttnnnnnnnnnnaagcttggcgtggatccgatatcaactagatcttgagacaaatggcagtattcatccacaattttaaaagaaaaggggggattggggggtacagtgcaggggaaagaatagtagacataatagcaacagacatacaaactaaag

SEQ ID NO: 20055 - DNA, 301 bp, Artificial Sequence
  Wrn.2_NTC.7
  crRNA array
  misc_feature (148)..(157): n is a, c, g, or t
cttggctttatatatcttgtggaaaggacgaaacaccgtaatttctactaagtgtagatgccatgtccagcagaacctttaatttctactaagtgtagatcgccgaacggataagactattaatttctactaagtgtagatttttttnnnnnnnnnnaagcttggcgtggatccgatatcaactagatcttgagacaaatggcagtattcatccacaattttaaaagaaaaggggggattggggggtacagtgcaggggaaagaatagtagacataatagcaacagacatacaaactaaag

SEQ ID NO: 20056 - DNA, 301 bp, Artificial Sequence
  Wrn.2_NTC.8
  crRNA array
  misc_feature (148)..(157): n is a, c, g, or t
cttggctttatatatcttgtggaaaggacgaaacaccgtaatttctactaagtgtagatgccatgtccagcagaacctttaatttctactaagtgtagatcgaccgaggttacgctgggataatttctactaagtgtagatttttttnnnnnnnnnnaagcttggcgtggatccgatatcaactagatcttgagacaaatggcagtattcatccacaattttaaaagaaaaggggggattggggggtacagtgcaggggaaagaatagtagacataatagcaacagacatacaaactaaag

SEQ ID NO: 20057 - DNA, 301 bp, Artificial Sequence
  Wrn.2_NTC.9
  crRNA array
  misc_feature (148)..(157): n is a, c, g, or t
cttggctttatatatcttgtggaaaggacgaaacaccgtaatttctactaagtgtagatgccatgtccagcagaacctttaatttctactaagtgtagatatcgccgtacggctatggcataatttctactaagtgtagatttttttnnnnnnnnnnaagcttggcgtggatccgatatcaactagatcttgagacaaatggcagtattcatccacaattttaaaagaaaaggggggattggggggtacagtgcaggggaaagaatagtagacataatagcaacagacatacaaactaaag

SEQ ID NO: 20058 - DNA, 301 bp, Artificial Sequence
  Wrn.3_NTC.0
  crRNA array
  misc_feature (148)..(157): n is a, c, g, or t
cttggctttatatatcttgtggaaaggacgaaacaccgtaatttctactaagtgtagatctgcagcaggccaccgcaattaatttctactaagtgtagattatagcgtcgcgcgctaatttaatttctactaagtgtagatttttttnnnnnnnnnnaagcttggcgtggatccgatatcaactagatcttgagacaaatggcagtattcatccacaattttaaaagaaaaggggggattggggggtacagtgcaggggaaagaatagtagacataatagcaacagacatacaaactaaag

SEQ ID NO: 20059 - DNA, 301 bp, Artificial Sequence
  Wrn.3_NTC.1
  crRNA array
  misc_feature (148)..(157): n is a, c, g, or t
cttggctttatatatcttgtggaaaggacgaaacaccgtaatttctactaagtgtagatctgcagcaggccaccgcaattaatttctactaagtgtagatcgcgtaaccgttccggctcctaatttctactaagtgtagatttttttnnnnnnnnnnaagcttggcgtggatccgatatcaactagatcttgagacaaatggcagtattcatccacaattttaaaagaaaaggggggattggggggtacagtgcaggggaaagaatagtagacataatagcaacagacatacaaactaaag

SEQ ID NO: 20060 - DNA, 301 bp, Artificial Sequence
  Wrn.3_NTC.10
  crRNA array
  misc_feature (148)..(157): n is a, c, g, or t
cttggctttatatatcttgtggaaaggacgaaacaccgtaatttctactaagtgtagatctgcagcaggccaccgcaattaatttctactaagtgtagatcgctaagttcgcgcgggccgtaatttctactaagtgtagatttttttnnnnnnnnnnaagcttggcgtggatccgatatcaactagatcttgagacaaatggcagtattcatccacaattttaaaagaaaaggggggattggggggtacagtgcaggggaaagaatagtagacataatagcaacagacatacaaactaaag

SEQ ID NO: 20061 - DNA, 301 bp, Artificial Sequence
  Wrn.3_NTC.11
  crRNA array
  misc_feature (148)..(157): n is a, c, g, or t
cttggctttatatatcttgtggaaaggacgaaacaccgtaatttctactaagtgtagatctgcagcaggccaccgcaattaatttctactaagtgtagatcgttcgtcgacgaagcaatctaatttctactaagtgtagatttttttnnnnnnnnnnaagcttggcgtggatccgatatcaactagatcttgagacaaatggcagtattcatccacaattttaaaagaaaaggggggattggggggtacagtgcaggggaaagaatagtagacataatagcaacagacatacaaactaaag

SEQ ID NO: 20062 - DNA, 301 bp, Artificial Sequence
  Wrn.3_NTC.12
  crRNA array
  misc_feature (148)..(157): n is a, c, g, or t
cttggctttatatatcttgtggaaaggacgaaacaccgtaatttctactaagtgtagatctgcagcaggccaccgcaattaatttctactaagtgtagatcgccgacgattaatcaatagtaatttctactaagtgtagatttttttnnnnnnnnnnaagcttggcgtggatccgatatcaactagatcttgagacaaatggcagtattcatccacaattttaaaagaaaaggggggattggggggtacagtgcaggggaaagaatagtagacataatagcaacagacatacaaactaaag

SEQ ID NO: 20063 - DNA, 301 bp, Artificial Sequence
  Wrn.3_NTC.13
  crRNA array
  misc_feature (148)..(157): n is a, c, g, or t
cttggctttatatatcttgtggaaaggacgaaacaccgtaatttctactaagtgtagatctgcagcaggccaccgcaattaatttctactaagtgtagatgaccgttgtatcgcgatcaataatttctactaagtgtagatttttttnnnnnnnnnnaagcttggcgtggatccgatatcaactagatcttgagacaaatggcagtattcatccacaattttaaaagaaaaggggggattggggggtacagtgcaggggaaagaatagtagacataatagcaacagacatacaaactaaag

SEQ ID NO: 20064 - DNA, 301 bp, Artificial Sequence
  Wrn.3_NTC.14
  crRNA array
  misc_feature (148)..(157): n is a, c, g, or t
cttggctttatatatcttgtggaaaggacgaaacaccgtaatttctactaagtgtagatctgcagcaggccaccgcaattaatttctactaagtgtagatccgttcgtgcgatagtgttttaatttctactaagtgtagatttttttnnnnnnnnnnaagcttggcgtggatccgatatcaactagatcttgagacaaatggcagtattcatccacaattttaaaagaaaaggggggattggggggtacagtgcaggggaaagaatagtagacataatagcaacagacatacaaactaaag

SEQ ID NO: 20065 - DNA, 301 bp, Artificial Sequence
  Wrn.3_NTC.15
  crRNA array
  misc_feature (148)..(157): n is a, c, g, or t
cttggctttatatatcttgtggaaaggacgaaacaccgtaatttctactaagtgtagatctgcagcaggccaccgcaattaatttctactaagtgtagatgttgtcgtgccgcgaatttataatttctactaagtgtagatttttttnnnnnnnnnnaagcttggcgtggatccgatatcaactagatcttgagacaaatggcagtattcatccacaattttaaaagaaaaggggggattggggggtacagtgcaggggaaagaatagtagacataatagcaacagacatacaaactaaag

SEQ ID NO: 20066 - DNA, 301 bp, Artificial Sequence
  Wrn.3_NTC.16
  crRNA array
  misc_feature (148)..(157): n is a, c, g, or t
cttggctttatatatcttgtggaaaggacgaaacaccgtaatttctactaagtgtagatctgcagcaggccaccgcaattaatttctactaagtgtagatcggtacgttagacgaaaatttaatttctactaagtgtagatttttttnnnnnnnnnnaagcttggcgtggatccgatatcaactagatcttgagacaaatggcagtattcatccacaattttaaaagaaaaggggggattggggggtacagtgcaggggaaagaatagtagacataatagcaacagacatacaaactaaag

SEQ ID NO: 20067 - DNA, 301 bp, Artificial Sequence
  Wrn.3_NTC.17
  crRNA array
  misc_feature (148)..(157): n is a, c, g, or t
cttggctttatatatcttgtggaaaggacgaaacaccgtaatttctactaagtgtagatctgcagcaggccaccgcaattaatttctactaagtgtagattatcgaacgctatcgaacgttaatttctactaagtgtagatttttttnnnnnnnnnnaagcttggcgtggatccgatatcaactagatcttgagacaaatggcagtattcatccacaattttaaaagaaaaggggggattggggggtacagtgcaggggaaagaatagtagacataatagcaacagacatacaaactaaag

SEQ ID NO: 20068 - DNA, 301 bp, Artificial Sequence
  Wrn.3_NTC.18
  crRNA array
  misc_feature (148)..(157): n is a, c, g, or t
cttggctttatatatcttgtggaaaggacgaaacaccgtaatttctactaagtgtagatctgcagcaggccaccgcaattaatttctactaagtgtagattccggttacgaccggcaaaataatttctactaagtgtagatttttttnnnnnnnnnnaagcttggcgtggatccgatatcaactagatcttgagacaaatggcagtattcatccacaattttaaaagaaaaggggggattggggggtacagtgcaggggaaagaatagtagacataatagcaacagacatacaaactaaag

SEQ ID NO: 20069 - DNA, 301 bp, Artificial Sequence
  Wrn.3_NTC.19
  crRNA array
  misc_feature (148)..(157): n is a, c, g, or t
cttggctttatatatcttgtggaaaggacgaaacaccgtaatttctactaagtgtagatctgcagcaggccaccgcaattaatttctactaagtgtagatcgtcgtagaacgatacccgataatttctactaagtgtagatttttttnnnnnnnnnnaagcttggcgtggatccgatatcaactagatcttgagacaaatggcagtattcatccacaattttaaaagaaaaggggggattggggggtacagtgcaggggaaagaatagtagacataatagcaacagacatacaaactaaag

SEQ ID NO: 20070 - DNA, 301 bp, Artificial Sequence
  Wrn.3_NTC.2
  crRNA array
  misc_feature (148)..(157): n is a, c, g, or t
cttggctttatatatcttgtggaaaggacgaaacaccgtaatttctactaagtgtagatctgcagcaggccaccgcaattaatttctactaagtgtagatttatgtcgcgccgcgacccgtaatttctactaagtgtagatttttttnnnnnnnnnnaagcttggcgtggatccgatatcaactagatcttgagacaaatggcagtattcatccacaattttaaaagaaaaggggggattggggggtacagtgcaggggaaagaatagtagacataatagcaacagacatacaaactaaag

SEQ ID NO: 20071 - DNA, 301 bp, Artificial Sequence
  Wrn.3_NTC.20
  crRNA array
  misc_feature (148)..(157): n is a, c, g, or t
cttggctttatatatcttgtggaaaggacgaaacaccgtaatttctactaagtgtagatctgcagcaggccaccgcaattaatttctactaagtgtagatattccggcgcgaccagaagataatttctactaagtgtagatttttttnnnnnnnnnnaagcttggcgtggatccgatatcaactagatcttgagacaaatggcagtattcatccacaattttaaaagaaaaggggggattggggggtacagtgcaggggaaagaatagtagacataatagcaacagacatacaaactaaag

SEQ ID NO: 20072 - DNA, 301 bp, Artificial Sequence
  Wrn.3_NTC.21
  crRNA array
  misc_feature (148)..(157): n is a, c, g, or t
cttggctttatatatcttgtggaaaggacgaaacaccgtaatttctactaagtgtagatctgcagcaggccaccgcaattaatttctactaagtgtagatgtataacttcgcgcggtccgtaatttctactaagtgtagatttttttnnnnnnnnnnaagcttggcgtggatccgatatcaactagatcttgagacaaatggcagtattcatccacaattttaaaagaaaaggggggattggggggtacagtgcaggggaaagaatagtagacataatagcaacagacatacaaactaaag

SEQ ID NO: 20073 - DNA, 301 bp, Artificial Sequence
  Wrn.3_NTC.22
  crRNA array
  misc_feature (148)..(157): n is a, c, g, or t
cttggctttatatatcttgtggaaaggacgaaacaccgtaatttctactaagtgtagatctgcagcaggccaccgcaattaatttctactaagtgtagatgcgcgtcaacgtaatgtgcctaatttctactaagtgtagatttttttnnnnnnnnnnaagcttggcgtggatccgatatcaactagatcttgagacaaatggcagtattcatccacaattttaaaagaaaaggggggattggggggtacagtgcaggggaaagaatagtagacataatagcaacagacatacaaactaaag

SEQ ID NO: 20074 - DNA, 301 bp, Artificial Sequence
  Wrn.3_NTC.23
  crRNA array
  misc_feature (148)..(157): n is a, c, g, or t
cttggctttatatatcttgtggaaaggacgaaacaccgtaatttctactaagtgtagatctgcagcaggccaccgcaattaatttctactaagtgtagatacgcgctattatcgtaggtgtaatttctactaagtgtagatttttttnnnnnnnnnnaagcttggcgtggatccgatatcaactagatcttgagacaaatggcagtattcatccacaattttaaaagaaaaggggggattggggggtacagtgcaggggaaagaatagtagacataatagcaacagacatacaaactaaag

SEQ ID NO: 20075 - DNA, 301 bp, Artificial Sequence
  Wrn.3_NTC.24
  crRNA array
  misc_feature (148)..(157): n is a, c, g, or t
cttggctttatatatcttgtggaaaggacgaaacaccgtaatttctactaagtgtagatctgcagcaggccaccgcaattaatttctactaagtgtagatactatcgacgttcgtcccggtaatttctactaagtgtagatttttttnnnnnnnnnnaagcttggcgtggatccgatatcaactagatcttgagacaaatggcagtattcatccacaattttaaaagaaaaggggggattggggggtacagtgcaggggaaagaatagtagacataatagcaacagacatacaaactaaag

SEQ ID NO: 20076 - DNA, 301 bp, Artificial Sequence
  Wrn.3_NTC.25
  crRNA array
  misc_feature (148)..(157): n is a, c, g, or t
cttggctttatatatcttgtggaaaggacgaaacaccgtaatttctactaagtgtagatctgcagcaggccaccgcaattaatttctactaagtgtagattcgcgttatcgtgccgtgcgtaatttctactaagtgtagatttttttnnnnnnnnnnaagcttggcgtggatccgatatcaactagatcttgagacaaatggcagtattcatccacaattttaaaagaaaaggggggattggggggtacagtgcaggggaaagaatagtagacataatagcaacagacatacaaactaaag

SEQ ID NO: 20077 - DNA, 301 bp, Artificial Sequence
  Wrn.3_NTC.26
  crRNA array
  misc_feature (148)..(157): n is a, c, g, or t
cttggctttatatatcttgtggaaaggacgaaacaccgtaatttctactaagtgtagatctgcagcaggccaccgcaattaatttctactaagtgtagatcgcgacggcggttttaacactaatttctactaagtgtagatttttttnnnnnnnnnnaagcttggcgtggatccgatatcaactagatcttgagacaaatggcagtattcatccacaattttaaaagaaaaggggggattggggggtacagtgcaggggaaagaatagtagacataatagcaacagacatacaaactaaag

SEQ ID NO: 20078 - DNA, 301 bp, Artificial Sequence
  Wrn.3_NTC.27
  crRNA array
  misc_feature (148)..(157): n is a, c, g, or t
cttggctttatatatcttgtggaaaggacgaaacaccgtaatttctactaagtgtagatctgcagcaggccaccgcaattaatttctactaagtgtagatgtcgcgttgcgaccggcgcttaatttctactaagtgtagatttttttnnnnnnnnnnaagcttggcgtggatccgatatcaactagatcttgagacaaatggcagtattcatccacaattttaaaagaaaaggggggattggggggtacagtgcaggggaaagaatagtagacataatagcaacagacatacaaactaaag

SEQ ID NO: 20079 - DNA, 301 bp, Artificial Sequence
  Wrn.3_NTC.28
  crRNA array
  misc_feature (148)..(157): n is a, c, g, or t
cttggctttatatatcttgtggaaaggacgaaacaccgtaatttctactaagtgtagatctgcagcaggccaccgcaattaatttctactaagtgtagataccgctaatcggcgtaaacttaatttctactaagtgtagatttttttnnnnnnnnnnaagcttggcgtggatccgatatcaactagatcttgagacaaatggcagtattcatccacaattttaaaagaaaaggggggattggggggtacagtgcaggggaaagaatagtagacataatagcaacagacatacaaactaaag

SEQ ID NO: 20080 - DNA, 301 bp, Artificial Sequence
  Wrn.3_NTC.29
  crRNA array
  misc_feature (148)..(157): n is a, c, g, or t
cttggctttatatatcttgtggaaaggacgaaacaccgtaatttctactaagtgtagatctgcagcaggccaccgcaattaatttctactaagtgtagatcgcgatctataccgtctatataatttctactaagtgtagatttttttnnnnnnnnnnaagcttggcgtggatccgatatcaactagatcttgagacaaatggcagtattcatccacaattttaaaagaaaaggggggattggggggtacagtgcaggggaaagaatagtagacataatagcaacagacatacaaactaaag

SEQ ID NO: 20081 - DNA, 301 bp, Artificial Sequence
  Wrn.3_NTC.3
  crRNA array
  misc_feature (148)..(157): n is a, c, g, or t
cttggctttatatatcttgtggaaaggacgaaacaccgtaatttctactaagtgtagatctgcagcaggccaccgcaattaatttctactaagtgtagattcgacgcgagacgacgtacataatttctactaagtgtagatttttttnnnnnnnnnnaagcttggcgtggatccgatatcaactagatcttgagacaaatggcagtattcatccacaattttaaaagaaaaggggggattggggggtacagtgcaggggaaagaatagtagacataatagcaacagacatacaaactaaag

SEQ ID NO: 20082 - DNA, 301 bp, Artificial Sequence
  Wrn.3_NTC.30
  crRNA array
  misc_feature (148)..(157): n is a, c, g, or t
cttggctttatatatcttgtggaaaggacgaaacaccgtaatttctactaagtgtagatctgcagcaggccaccgcaattaatttctactaagtgtagatcgatcgtacgggtgtcctaataatttctactaagtgtagatttttttnnnnnnnnnnaagcttggcgtggatccgatatcaactagatcttgagacaaatggcagtattcatccacaattttaaaagaaaaggggggattggggggtacagtgcaggggaaagaatagtagacataatagcaacagacatacaaactaaag

SEQ ID NO: 20083 - DNA, 301 bp, Artificial Sequence
  Wrn.3_NTC.31
  crRNA array
  misc_feature (148)..(157): n is a, c, g, or t
cttggctttatatatcttgtggaaaggacgaaacaccgtaatttctactaagtgtagatctgcagcaggccaccgcaattaatttctactaagtgtagatgccgaccgcgtgattgtaggtaatttctactaagtgtagatttttttnnnnnnnnnnaagcttggcgtggatccgatatcaactagatcttgagacaaatggcagtattcatccacaattttaaaagaaaaggggggattggggggtacagtgcaggggaaagaatagtagacataatagcaacagacatacaaactaaag

SEQ ID NO: 20084 - DNA, 301 bp, Artificial Sequence
  Wrn.3_NTC.32
  crRNA array
  misc_feature (148)..(157): n is a, c, g, or t
cttggctttatatatcttgtggaaaggacgaaacaccgtaatttctactaagtgtagatctgcagcaggccaccgcaattaatttctactaagtgtagatgcacgttacgcccgggtcactaatttctactaagtgtagatttttttnnnnnnnnnnaagcttggcgtggatccgatatcaactagatcttgagacaaatggcagtattcatccacaattttaaaagaaaaggggggattggggggtacagtgcaggggaaagaatagtagacataatagcaacagacatacaaactaaag

SEQ ID NO: 20085 - DNA, 301 bp, Artificial Sequence
  Wrn.3_NTC.33
  crRNA array
  misc_feature (148)..(157): n is a, c, g, or t
cttggctttatatatcttgtggaaaggacgaaacaccgtaatttctactaagtgtagatctgcagcaggccaccgcaattaatttctactaagtgtagattaagcgaccgacgcattcgctaatttctactaagtgtagatttttttnnnnnnnnnnaagcttggcgtggatccgatatcaactagatcttgagacaaatggcagtattcatccacaattttaaaagaaaaggggggattggggggtacagtgcaggggaaagaatagtagacataatagcaacagacatacaaactaaag

SEQ ID NO: 20086 - DNA, 301 bp, Artificial Sequence
  Wrn.3_NTC.34
  crRNA array
  misc_feature (148)..(157): n is a, c, g, or t
cttggctttatatatcttgtggaaaggacgaaacaccgtaatttctactaagtgtagatctgcagcaggccaccgcaattaatttctactaagtgtagattagcgttcgacacgtgaaactaatttctactaagtgtagatttttttnnnnnnnnnnaagcttggcgtggatccgatatcaactagatcttgagacaaatggcagtattcatccacaattttaaaagaaaaggggggattggggggtacagtgcaggggaaagaatagtagacataatagcaacagacatacaaactaaag

SEQ ID NO: 20087 - DNA, 301 bp, Artificial Sequence
  Wrn.3_NTC.35
  crRNA array
  misc_feature (148)..(157): n is a, c, g, or t
cttggctttatatatcttgtggaaaggacgaaacaccgtaatttctactaagtgtagatctgcagcaggccaccgcaattaatttctactaagtgtagattggcgcgtaatcgctattcgtaatttctactaagtgtagatttttttnnnnnnnnnnaagcttggcgtggatccgatatcaactagatcttgagacaaatggcagtattcatccacaattttaaaagaaaaggggggattggggggtacagtgcaggggaaagaatagtagacataatagcaacagacatacaaactaaag

SEQ ID NO: 20088 - DNA, 301 bp, Artificial Sequence
  Wrn.3_NTC.36
  crRNA array
  misc_feature (148)..(157): n is a, c, g, or t
cttggctttatatatcttgtggaaaggacgaaacaccgtaatttctactaagtgtagatctgcagcaggccaccgcaattaatttctactaagtgtagatcaacccgccgtagcgggccttaatttctactaagtgtagatttttttnnnnnnnnnnaagcttggcgtggatccgatatcaactagatcttgagacaaatggcagtattcatccacaattttaaaagaaaaggggggattggggggtacagtgcaggggaaagaatagtagacataatagcaacagacatacaaactaaag

SEQ ID NO: 20089 - DNA, 301 bp, Artificial Sequence
  Wrn.3_NTC.37
  crRNA array
  misc_feature (148)..(157): n is a, c, g, or t
cttggctttatatatcttgtggaaaggacgaaacaccgtaatttctactaagtgtagatctgcagcaggccaccgcaattaatttctactaagtgtagattttgcgttgacgcgattacttaatttctactaagtgtagatttttttnnnnnnnnnnaagcttggcgtggatccgatatcaactagatcttgagacaaatggcagtattcatccacaattttaaaagaaaaggggggattggggggtacagtgcaggggaaagaatagtagacataatagcaacagacatacaaactaaag

SEQ ID NO: 20090 - DNA, 301 bp, Artificial Sequence
  Wrn.3_NTC.38
  crRNA array
  misc_feature (148)..(157): n is a, c, g, or t
cttggctttatatatcttgtggaaaggacgaaacaccgtaatttctactaagtgtagatctgcagcaggccaccgcaattaatttctactaagtgtagataacggagcgcgatactaccataatttctactaagtgtagatttttttnnnnnnnnnnaagcttggcgtggatccgatatcaactagatcttgagacaaatggcagtattcatccacaattttaaaagaaaaggggggattggggggtacagtgcaggggaaagaatagtagacataatagcaacagacatacaaactaaag

SEQ ID NO: 20091 - DNA, 301 bp, Artificial Sequence
  Wrn.3_NTC.39
  crRNA array
  misc_feature (148)..(157): n is a, c, g, or t
cttggctttatatatcttgtggaaaggacgaaacaccgtaatttctactaagtgtagatctgcagcaggccaccgcaattaatttctactaagtgtagatccggacgttataacgtttcttaatttctactaagtgtagatttttttnnnnnnnnnnaagcttggcgtggatccgatatcaactagatcttgagacaaatggcagtattcatccacaattttaaaagaaaaggggggattggggggtacagtgcaggggaaagaatagtagacataatagcaacagacatacaaactaaag

SEQ ID NO: 20092 - DNA, 301 bp, Artificial Sequence
  Wrn.3_NTC.4
  crRNA array
  misc_feature (148)..(157): n is a, c, g, or t
cttggctttatatatcttgtggaaaggacgaaacaccgtaatttctactaagtgtagatctgcagcaggccaccgcaattaatttctactaagtgtagatatacccgtcgcgaacgtgagtaatttctactaagtgtagatttttttnnnnnnnnnnaagcttggcgtggatccgatatcaactagatcttgagacaaatggcagtattcatccacaattttaaaagaaaaggggggattggggggtacagtgcaggggaaagaatagtagacataatagcaacagacatacaaactaaag

SEQ ID NO: 20093 - DNA, 301 bp, Artificial Sequence
  Wrn.3_NTC.40
  crRNA array
  misc_feature (148)..(157): n is a, c, g, or t
cttggctttatatatcttgtggaaaggacgaaacaccgtaatttctactaagtgtagatctgcagcaggccaccgcaattaatttctactaagtgtagatattcgcgaacccggccggaataatttctactaagtgtagatttttttnnnnnnnnnnaagcttggcgtggatccgatatcaactagatcttgagacaaatggcagtattcatccacaattttaaaagaaaaggggggattggggggtacagtgcaggggaaagaatagtagacataatagcaacagacatacaaactaaag

SEQ ID NO: 20094 - DNA, 301 bp, Artificial Sequence
  Wrn.3_NTC.41
  crRNA array
  misc_feature (148)..(157): n is a, c, g, or t
cttggctttatatatcttgtggaaaggacgaaacaccgtaatttctactaagtgtagatctgcagcaggccaccgcaattaatttctactaagtgtagatttgatggcgcgacgcgttattaatttctactaagtgtagatttttttnnnnnnnnnnaagcttggcgtggatccgatatcaactagatcttgagacaaatggcagtattcatccacaattttaaaagaaaaggggggattggggggtacagtgcaggggaaagaatagtagacataatagcaacagacatacaaactaaag

SEQ ID NO: 20095 - DNA, 301 bp, Artificial Sequence
  Wrn.3_NTC.42
  crRNA array
  misc_feature (148)..(157): n is a, c, g, or t
cttggctttatatatcttgtggaaaggacgaaacaccgtaatttctactaagtgtagatctgcagcaggccaccgcaattaatttctactaagtgtagatggtcaaatcgcggcgataactaatttctactaagtgtagatttttttnnnnnnnnnnaagcttggcgtggatccgatatcaactagatcttgagacaaatggcagtattcatccacaattttaaaagaaaaggggggattggggggtacagtgcaggggaaagaatagtagacataatagcaacagacatacaaactaaag

SEQ ID NO: 20096 - DNA, 301 bp, Artificial Sequence
  Wrn.3_NTC.43
  crRNA array
  misc_feature (148)..(157): n is a, c, g, or t
cttggctttatatatcttgtggaaaggacgaaacaccgtaatttctactaagtgtagatctgcagcaggccaccgcaattaatttctactaagtgtagatcgactcgcgcattgaactggtaatttctactaagtgtagatttttttnnnnnnnnnnaagcttggcgtggatccgatatcaactagatcttgagacaaatggcagtattcatccacaattttaaaagaaaaggggggattggggggtacagtgcaggggaaagaatagtagacataatagcaacagacatacaaactaaag

SEQ ID NO: 20097 - DNA, 301 bp, Artificial Sequence
  Wrn.3_NTC.44
  crRNA array
  misc_feature (148)..(157): n is a, c, g, or t
cttggctttatatatcttgtggaaaggacgaaacaccgtaatttctactaagtgtagatctgcagcaggccaccgcaattaatttctactaagtgtagatagcgtcgtacgatttatcgttaatttctactaagtgtagatttttttnnnnnnnnnnaagcttggcgtggatccgatatcaactagatcttgagacaaatggcagtattcatccacaattttaaaagaaaaggggggattggggggtacagtgcaggggaaagaatagtagacataatagcaacagacatacaaactaaag

SEQ ID NO: 20098 - DNA, 301 bp, Artificial Sequence
  Wrn.3_NTC.45
  crRNA array
  misc_feature (148)..(157): n is a, c, g, or t
cttggctttatatatcttgtggaaaggacgaaacaccgtaatttctactaagtgtagatctgcagcaggccaccgcaattaatttctactaagtgtagatcggaacgcgtgatactagggtaatttctactaagtgtagatttttttnnnnnnnnnnaagcttggcgtggatccgatatcaactagatcttgagacaaatggcagtattcatccacaattttaaaagaaaaggggggattggggggtacagtgcaggggaaagaatagtagacataatagcaacagacatacaaactaaag

SEQ ID NO: 20099 - DNA, 301 bp, Artificial Sequence
  Wrn.3_NTC.46
  crRNA array
  misc_feature (148)..(157): n is a, c, g, or t
cttggctttatatatcttgtggaaaggacgaaacaccgtaatttctactaagtgtagatctgcagcaggccaccgcaattaatttctactaagtgtagatagcgggtcgtagacgcgcggtaatttctactaagtgtagatttttttnnnnnnnnnnaagcttggcgtggatccgatatcaactagatcttgagacaaatggcagtattcatccacaattttaaaagaaaaggggggattggggggtacagtgcaggggaaagaatagtagacataatagcaacagacatacaaactaaag

SEQ ID NO: 20100 - DNA, 301 bp, Artificial Sequence
  Wrn.3_NTC.47
  crRNA array
  misc_feature (148)..(157): n is a, c, g, or t
cttggctttatatatcttgtggaaaggacgaaacaccgtaatttctactaagtgtagatctgcagcaggccaccgcaattaatttctactaagtgtagattctcgtatcgcgattgttaataatttctactaagtgtagatttttttnnnnnnnnnnaagcttggcgtggatccgatatcaactagatcttgagacaaatggcagtattcatccacaattttaaaagaaaaggggggattggggggtacagtgcaggggaaagaatagtagacataatagcaacagacatacaaactaaag

SEQ ID NO: 20101 - DNA, 301 bp, Artificial Sequence
  Wrn.3_NTC.48
  crRNA array
  misc_feature (148)..(157): n is a, c, g, or t
cttggctttatatatcttgtggaaaggacgaaacaccgtaatttctactaagtgtagatctgcagcaggccaccgcaattaatttctactaagtgtagatcggtcgactacggctgttagtaatttctactaagtgtagatttttttnnnnnnnnnnaagcttggcgtggatccgatatcaactagatcttgagacaaatggcagtattcatccacaattttaaaagaaaaggggggattggggggtacagtgcaggggaaagaatagtagacataatagcaacagacatacaaactaaag

SEQ ID NO: 20102 - DNA, 301 bp, Artificial Sequence
  Wrn.3_NTC.49
  crRNA array
  misc_feature (148)..(157): n is a, c, g, or t
cttggctttatatatcttgtggaaaggacgaaacaccgtaatttctactaagtgtagatctgcagcaggccaccgcaattaatttctactaagtgtagattcggggcgcgtcaactgaattaatttctactaagtgtagatttttttnnnnnnnnnnaagcttggcgtggatccgatatcaactagatcttgagacaaatggcagtattcatccacaattttaaaagaaaaggggggattggggggtacagtgcaggggaaagaatagtagacataatagcaacagacatacaaactaaag

SEQ ID NO: 20103 - DNA, 301 bp, Artificial Sequence
  Wrn.3_NTC.5
  crRNA array
  misc_feature (148)..(157): n is a, c, g, or t
cttggctttatatatcttgtggaaaggacgaaacaccgtaatttctactaagtgtagatctgcagcaggccaccgcaattaatttctactaagtgtagatgcttacgcgtcgcgaatgtataatttctactaagtgtagatttttttnnnnnnnnnnaagcttggcgtggatccgatatcaactagatcttgagacaaatggcagtattcatccacaattttaaaagaaaaggggggattggggggtacagtgcaggggaaagaatagtagacataatagcaacagacatacaaactaaag

SEQ ID NO: 20104 - DNA, 301 bp, Artificial Sequence
  Wrn.3_NTC.50
  crRNA array
  misc_feature (148)..(157): n is a, c, g, or t
cttggctttatatatcttgtggaaaggacgaaacaccgtaatttctactaagtgtagatctgcagcaggccaccgcaattaatttctactaagtgtagatattgccgctcgcgcaaaatctaatttctactaagtgtagatttttttnnnnnnnnnnaagcttggcgtggatccgatatcaactagatcttgagacaaatggcagtattcatccacaattttaaaagaaaaggggggattggggggtacagtgcaggggaaagaatagtagacataatagcaacagacatacaaactaaag

SEQ ID NO: 20105 - DNA, 301 bp, Artificial Sequence
  Wrn.3_NTC.51
  crRNA array
  misc_feature (148)..(157): n is a, c, g, or t
cttggctttatatatcttgtggaaaggacgaaacaccgtaatttctactaagtgtagatctgcagcaggccaccgcaattaatttctactaagtgtagattaacgcgcaacacgccaatgtaatttctactaagtgtagatttttttnnnnnnnnnnaagcttggcgtggatccgatatcaactagatcttgagacaaatggcagtattcatccacaattttaaaagaaaaggggggattggggggtacagtgcaggggaaagaatagtagacataatagcaacagacatacaaactaaag

SEQ ID NO: 20106 - DNA, 301 bp, Artificial Sequence
  Wrn.3_NTC.6
  crRNA array
  misc_feature (148)..(157): n is a, c, g, or t
cttggctttatatatcttgtggaaaggacgaaacaccgtaatttctactaagtgtagatctgcagcaggccaccgcaattaatttctactaagtgtagatcgaatcgcgcctacgggaattaatttctactaagtgtagatttttttnnnnnnnnnnaagcttggcgtggatccgatatcaactagatcttgagacaaatggcagtattcatccacaattttaaaagaaaaggggggattggggggtacagtgcaggggaaagaatagtagacataatagcaacagacatacaaactaaag

SEQ ID NO: 20107 - DNA, 301 bp, Artificial Sequence
  Wrn.3_NTC.7
  crRNA array
  misc_feature (148)..(157): n is a, c, g, or t
cttggctttatatatcttgtggaaaggacgaaacaccgtaatttctactaagtgtagatctgcagcaggccaccgcaattaatttctactaagtgtagatcgccgaacggataagactattaatttctactaagtgtagatttttttnnnnnnnnnnaagcttggcgtggatccgatatcaactagatcttgagacaaatggcagtattcatccacaattttaaaagaaaaggggggattggggggtacagtgcaggggaaagaatagtagacataatagcaacagacatacaaactaaag

SEQ ID NO: 20108 - DNA, 301 bp, Artificial Sequence
  Wrn.3_NTC.8
  crRNA array
  misc_feature (148)..(157): n is a, c, g, or t
cttggctttatatatcttgtggaaaggacgaaacaccgtaatttctactaagtgtagatctgcagcaggccaccgcaattaatttctactaagtgtagatcgaccgaggttacgctgggataatttctactaagtgtagatttttttnnnnnnnnnnaagcttggcgtggatccgatatcaactagatcttgagacaaatggcagtattcatccacaattttaaaagaaaaggggggattggggggtacagtgcaggggaaagaatagtagacataatagcaacagacatacaaactaaag

SEQ ID NO: 20109 - DNA, 301 bp, Artificial Sequence
  Wrn.3_NTC.9
  crRNA array
  misc_feature (148)..(157): n is a, c, g, or t
cttggctttatatatcttgtggaaaggacgaaacaccgtaatttctactaagtgtagatctgcagcaggccaccgcaattaatttctactaagtgtagatatcgccgtacggctatggcataatttctactaagtgtagatttttttnnnnnnnnnnaagcttggcgtggatccgatatcaactagatcttgagacaaatggcagtattcatccacaattttaaaagaaaaggggggattggggggtacagtgcaggggaaagaatagtagacataatagcaacagacatacaaactaaag

SEQ ID NO: 20110 - DNA, 301 bp, Artificial Sequence
  Wrn.4_NTC.0
  crRNA array
  misc_feature (148)..(157): n is a, c, g, or t
cttggctttatatatcttgtggaaaggacgaaacaccgtaatttctactaagtgtagattcgaaggacaatagatgatgtaatttctactaagtgtagattatagcgtcgcgcgctaatttaatttctactaagtgtagatttttttnnnnnnnnnnaagcttggcgtggatccgatatcaactagatcttgagacaaatggcagtattcatccacaattttaaaagaaaaggggggattggggggtacagtgcaggggaaagaatagtagacataatagcaacagacatacaaactaaag

SEQ ID NO: 20111 - DNA, 301 bp, Artificial Sequence
  Wrn.4_NTC.1
  crRNA array
  misc_feature (148)..(157): n is a, c, g, or t
cttggctttatatatcttgtggaaaggacgaaacaccgtaatttctactaagtgtagattcgaaggacaatagatgatgtaatttctactaagtgtagatcgcgtaaccgttccggctcctaatttctactaagtgtagatttttttnnnnnnnnnnaagcttggcgtggatccgatatcaactagatcttgagacaaatggcagtattcatccacaattttaaaagaaaaggggggattggggggtacagtgcaggggaaagaatagtagacataatagcaacagacatacaaactaaag

SEQ ID NO: 20112 - DNA, 301 bp, Artificial Sequence
  Wrn.4_NTC.10
  crRNA array
  misc_feature (148)..(157): n is a, c, g, or t
cttggctttatatatcttgtggaaaggacgaaacaccgtaatttctactaagtgtagattcgaaggacaatagatgatgtaatttctactaagtgtagatcgctaagttcgcgcgggccgtaatttctactaagtgtagatttttttnnnnnnnnnnaagcttggcgtggatccgatatcaactagatcttgagacaaatggcagtattcatccacaattttaaaagaaaaggggggattggggggtacagtgcaggggaaagaatagtagacataatagcaacagacatacaaactaaag

SEQ ID NO: 20113 - DNA, 301 bp, Artificial Sequence
  Wrn.4_NTC.11
  crRNA array
  misc_feature (148)..(157): n is a, c, g, or t
cttggctttatatatcttgtggaaaggacgaaacaccgtaatttctactaagtgtagattcgaaggacaatagatgatgtaatttctactaagtgtagatcgttcgtcgacgaagcaatctaatttctactaagtgtagatttttttnnnnnnnnnnaagcttggcgtggatccgatatcaactagatcttgagacaaatggcagtattcatccacaattttaaaagaaaaggggggattggggggtacagtgcaggggaaagaatagtagacataatagcaacagacatacaaactaaag

SEQ ID NO: 20114 - DNA, 301 bp, Artificial Sequence
  Wrn.4_NTC.12
  crRNA array
  misc_feature (148)..(157): n is a, c, g, or t
cttggctttatatatcttgtggaaaggacgaaacaccgtaatttctactaagtgtagattcgaaggacaatagatgatgtaatttctactaagtgtagatcgccgacgattaatcaatagtaatttctactaagtgtagatttttttnnnnnnnnnnaagcttggcgtggatccgatatcaactagatcttgagacaaatggcagtattcatccacaattttaaaagaaaaggggggattggggggtacagtgcaggggaaagaatagtagacataatagcaacagacatacaaactaaag

SEQ ID NO: 20115 - DNA, 301 bp, Artificial Sequence
  Wrn.4_NTC.13
  crRNA array
  misc_feature (148)..(157): n is a, c, g, or t
cttggctttatatatcttgtggaaaggacgaaacaccgtaatttctactaagtgtagattcgaaggacaatagatgatgtaatttctactaagtgtagatgaccgttgtatcgcgatcaataatttctactaagtgtagatttttttnnnnnnnnnnaagcttggcgtggatccgatatcaactagatcttgagacaaatggcagtattcatccacaattttaaaagaaaaggggggattggggggtacagtgcaggggaaagaatagtagacataatagcaacagacatacaaactaaag

SEQ ID NO: 20116 - DNA, 301 bp, Artificial Sequence
  Wrn.4_NTC.14
  crRNA array
  misc_feature (148)..(157): n is a, c, g, or t
cttggctttatatatcttgtggaaaggacgaaacaccgtaatttctactaagtgtagattcgaaggacaatagatgatgtaatttctactaagtgtagatccgttcgtgcgatagtgttttaatttctactaagtgtagatttttttnnnnnnnnnnaagcttggcgtggatccgatatcaactagatcttgagacaaatggcagtattcatccacaattttaaaagaaaaggggggattggggggtacagtgcaggggaaagaatagtagacataatagcaacagacatacaaactaaag

SEQ ID NO: 20117 - DNA, 301 bp, Artificial Sequence
  Wrn.4_NTC.15
  crRNA array
  misc_feature (148)..(157): n is a, c, g, or t
cttggctttatatatcttgtggaaaggacgaaacaccgtaatttctactaagtgtagattcgaaggacaatagatgatgtaatttctactaagtgtagatgttgtcgtgccgcgaatttataatttctactaagtgtagatttttttnnnnnnnnnnaagcttggcgtggatccgatatcaactagatcttgagacaaatggcagtattcatccacaattttaaaagaaaaggggggattggggggtacagtgcaggggaaagaatagtagacataatagcaacagacatacaaactaaag

SEQ ID NO: 20118 - DNA, 301 bp, Artificial Sequence
  Wrn.4_NTC.16
  crRNA array
  misc_feature (148)..(157): n is a, c, g, or t
cttggctttatatatcttgtggaaaggacgaaacaccgtaatttctactaagtgtagattcgaaggacaatagatgatgtaatttctactaagtgtagatcggtacgttagacgaaaatttaatttctactaagtgtagatttttttnnnnnnnnnnaagcttggcgtggatccgatatcaactagatcttgagacaaatggcagtattcatccacaattttaaaagaaaaggggggattggggggtacagtgcaggggaaagaatagtagacataatagcaacagacatacaaactaaag

SEQ ID NO: 20119 - DNA, 301 bp, Artificial Sequence
  Wrn.4_NTC.17
  crRNA array
  misc_feature (148)..(157): n is a, c, g, or t
cttggctttatatatcttgtggaaaggacgaaacaccgtaatttctactaagtgtagattcgaaggacaatagatgatgtaatttctactaagtgtagattatcgaacgctatcgaacgttaatttctactaagtgtagatttttttnnnnnnnnnnaagcttggcgtggatccgatatcaactagatcttgagacaaatggcagtattcatccacaattttaaaagaaaaggggggattggggggtacagtgcaggggaaagaatagtagacataatagcaacagacatacaaactaaag

SEQ ID NO: 20120 - DNA, 301 bp, Artificial Sequence
  Wrn.4_NTC.18
  crRNA array
  misc_feature (148)..(157): n is a, c, g, or t
cttggctttatatatcttgtggaaaggacgaaacaccgtaatttctactaagtgtagattcgaaggacaatagatgatgtaatttctactaagtgtagattccggttacgaccggcaaaataatttctactaagtgtagatttttttnnnnnnnnnnaagcttggcgtggatccgatatcaactagatcttgagacaaatggcagtattcatccacaattttaaaagaaaaggggggattggggggtacagtgcaggggaaagaatagtagacataatagcaacagacatacaaactaaag

SEQ ID NO: 20121 - DNA, 301 bp, Artificial Sequence
  Wrn.4_NTC.19
  crRNA array
  misc_feature (148)..(157): n is a, c, g, or t
cttggctttatatatcttgtggaaaggacgaaacaccgtaatttctactaagtgtagattcgaaggacaatagatgatgtaatttctactaagtgtagatcgtcgtagaacgatacccgataatttctactaagtgtagatttttttnnnnnnnnnnaagcttggcgtggatccgatatcaactagatcttgagacaaatggcagtattcatccacaattttaaaagaaaaggggggattggggggtacagtgcaggggaaagaatagtagacataatagcaacagacatacaaactaaag

SEQ ID NO: 20122 - DNA, 301 bp, Artificial Sequence
  Wrn.4_NTC.2
  crRNA array
  misc_feature (148)..(157): n is a, c, g, or t
cttggctttatatatcttgtggaaaggacgaaacaccgtaatttctactaagtgtagattcgaaggacaatagatgatgtaatttctactaagtgtagatttatgtcgcgccgcgacccgtaatttctactaagtgtagatttttttnnnnnnnnnnaagcttggcgtggatccgatatcaactagatcttgagacaaatggcagtattcatccacaattttaaaagaaaaggggggattggggggtacagtgcaggggaaagaatagtagacataatagcaacagacatacaaactaaag

SEQ ID NO: 20123 - DNA, 301 bp, Artificial Sequence
  Wrn.4_NTC.20
  crRNA array
  misc_feature (148)..(157): n is a, c, g, or t
cttggctttatatatcttgtggaaaggacgaaacaccgtaatttctactaagtgtagattcgaaggacaatagatgatgtaatttctactaagtgtagatattccggcgcgaccagaagataatttctactaagtgtagatttttttnnnnnnnnnnaagcttggcgtggatccgatatcaactagatcttgagacaaatggcagtattcatccacaattttaaaagaaaaggggggattggggggtacagtgcaggggaaagaatagtagacataatagcaacagacatacaaactaaag

SEQ ID NO: 20124 - DNA, 301 bp, Artificial Sequence
  Wrn.4_NTC.21
  crRNA array
  misc_feature (148)..(157): n is a, c, g, or t
cttggctttatatatcttgtggaaaggacgaaacaccgtaatttctactaagtgtagattcgaaggacaatagatgatgtaatttctactaagtgtagatgtataacttcgcgcggtccgtaatttctactaagtgtagatttttttnnnnnnnnnnaagcttggcgtggatccgatatcaactagatcttgagacaaatggcagtattcatccacaattttaaaagaaaaggggggattggggggtacagtgcaggggaaagaatagtagacataatagcaacagacatacaaactaaag

SEQ ID NO: 20125 - DNA, 301 bp, Artificial Sequence
  Wrn.4_NTC.22
  crRNA array
  misc_feature (148)..(157): n is a, c, g, or t
cttggctttatatatcttgtggaaaggacgaaacaccgtaatttctactaagtgtagattcgaaggacaatagatgatgtaatttctactaagtgtagatgcgcgtcaacgtaatgtgcctaatttctactaagtgtagatttttttnnnnnnnnnnaagcttggcgtggatccgatatcaactagatcttgagacaaatggcagtattcatccacaattttaaaagaaaaggggggattggggggtacagtgcaggggaaagaatagtagacataatagcaacagacatacaaactaaag

SEQ ID NO: 20126 - DNA, 301 bp, Artificial Sequence
  Wrn.4_NTC.23
  crRNA array
  misc_feature (148)..(157): n is a, c, g, or t
cttggctttatatatcttgtggaaaggacgaaacaccgtaatttctactaagtgtagattcgaaggacaatagatgatgtaatttctactaagtgtagatacgcgctattatcgtaggtgtaatttctactaagtgtagatttttttnnnnnnnnnnaagcttggcgtggatccgatatcaactagatcttgagacaaatggcagtattcatccacaattttaaaagaaaaggggggattggggggtacagtgcaggggaaagaatagtagacataatagcaacagacatacaaactaaag

SEQ ID NO: 20127 - DNA, 301 bp, Artificial Sequence
  Wrn.4_NTC.24
  crRNA array
  misc_feature (148)..(157): n is a, c, g, or t
cttggctttatatatcttgtggaaaggacgaaacaccgtaatttctactaagtgtagattcgaaggacaatagatgatgtaatttctactaagtgtagatactatcgacgttcgtcccggtaatttctactaagtgtagatttttttnnnnnnnnnnaagcttggcgtggatccgatatcaactagatcttgagacaaatggcagtattcatccacaattttaaaagaaaaggggggattggggggtacagtgcaggggaaagaatagtagacataatagcaacagacatacaaactaaag

SEQ ID NO: 20128 - DNA, 301 bp, Artificial Sequence
  Wrn.4_NTC.25
  crRNA array
  misc_feature (148)..(157): n is a, c, g, or t
cttggctttatatatcttgtggaaaggacgaaacaccgtaatttctactaagtgtagattcgaaggacaatagatgatgtaatttctactaagtgtagattcgcgttatcgtgccgtgcgtaatttctactaagtgtagatttttttnnnnnnnnnnaagcttggcgtggatccgatatcaactagatcttgagacaaatggcagtattcatccacaattttaaaagaaaaggggggattggggggtacagtgcaggggaaagaatagtagacataatagcaacagacatacaaactaaag

SEQ ID NO: 20129 - DNA, 301 bp, Artificial Sequence
  Wrn.4_NTC.26
  crRNA array
  misc_feature (148)..(157): n is a, c, g, or t
cttggctttatatatcttgtggaaaggacgaaacaccgtaatttctactaagtgtagattcgaaggacaatagatgatgtaatttctactaagtgtagatcgcgacggcggttttaacactaatttctactaagtgtagatttttttnnnnnnnnnnaagcttggcgtggatccgatatcaactagatcttgagacaaatggcagtattcatccacaattttaaaagaaaaggggggattggggggtacagtgcaggggaaagaatagtagacataatagcaacagacatacaaactaaag

SEQ ID NO: 20130 - DNA, 301 bp, Artificial Sequence
  Wrn.4_NTC.27
  crRNA array
  misc_feature (148)..(157): n is a, c, g, or t
cttggctttatatatcttgtggaaaggacgaaacaccgtaatttctactaagtgtagattcgaaggacaatagatgatgtaatttctactaagtgtagatgtcgcgttgcgaccggcgcttaatttctactaagtgtagatttttttnnnnnnnnnnaagcttggcgtggatccgatatcaactagatcttgagacaaatggcagtattcatccacaattttaaaagaaaaggggggattggggggtacagtgcaggggaaagaatagtagacataatagcaacagacatacaaactaaag

SEQ ID NO: 20131 - DNA, 301 bp, Artificial Sequence
  Wrn.4_NTC.28
  crRNA array
  misc_feature (148)..(157): n is a, c, g, or t
cttggctttatatatcttgtggaaaggacgaaacaccgtaatttctactaagtgtagattcgaaggacaatagatgatgtaatttctactaagtgtagataccgctaatcggcgtaaacttaatttctactaagtgtagatttttttnnnnnnnnnnaagcttggcgtggatccgatatcaactagatcttgagacaaatggcagtattcatccacaattttaaaagaaaaggggggattggggggtacagtgcaggggaaagaatagtagacataatagcaacagacatacaaactaaag

SEQ ID NO: 20132 - DNA, 301 bp, Artificial Sequence
  Wrn.4_NTC.29
  crRNA array
  misc_feature (148)..(157): n is a, c, g, or t
cttggctttatatatcttgtggaaaggacgaaacaccgtaatttctactaagtgtagattcgaaggacaatagatgatgtaatttctactaagtgtagatcgcgatctataccgtctatataatttctactaagtgtagatttttttnnnnnnnnnnaagcttggcgtggatccgatatcaactagatcttgagacaaatggcagtattcatccacaattttaaaagaaaaggggggattggggggtacagtgcaggggaaagaatagtagacataatagcaacagacatacaaactaaag

SEQ ID NO: 20133 - DNA, 301 bp, Artificial Sequence
  Wrn.4_NTC.3
  crRNA array
  misc_feature (148)..(157): n is a, c, g, or t
cttggctttatatatcttgtggaaaggacgaaacaccgtaatttctactaagtgtagattcgaaggacaatagatgatgtaatttctactaagtgtagattcgacgcgagacgacgtacataatttctactaagtgtagatttttttnnnnnnnnnnaagcttggcgtggatccgatatcaactagatcttgagacaaatggcagtattcatccacaattttaaaagaaaaggggggattggggggtacagtgcaggggaaagaatagtagacataatagcaacagacatacaaactaaag

SEQ ID NO: 20134 - DNA, 301 bp, Artificial Sequence
  Wrn.4_NTC.30
  crRNA array
  misc_feature (148)..(157): n is a, c, g, or t
cttggctttatatatcttgtggaaaggacgaaacaccgtaatttctactaagtgtagattcgaaggacaatagatgatgtaatttctactaagtgtagatcgatcgtacgggtgtcctaataatttctactaagtgtagatttttttnnnnnnnnnnaagcttggcgtggatccgatatcaactagatcttgagacaaatggcagtattcatccacaattttaaaagaaaaggggggattggggggtacagtgcaggggaaagaatagtagacataatagcaacagacatacaaactaaag

SEQ ID NO: 20135 - DNA, 301 bp, Artificial Sequence
  Wrn.4_NTC.31
  crRNA array
  misc_feature (148)..(157): n is a, c, g, or t
cttggctttatatatcttgtggaaaggacgaaacaccgtaatttctactaagtgtagattcgaaggacaatagatgatgtaatttctactaagtgtagatgccgaccgcgtgattgtaggtaatttctactaagtgtagatttttttnnnnnnnnnnaagcttggcgtggatccgatatcaactagatcttgagacaaatggcagtattcatccacaattttaaaagaaaaggggggattggggggtacagtgcaggggaaagaatagtagacataatagcaacagacatacaaactaaag

SEQ ID NO: 20136 - DNA, 301 bp, Artificial Sequence
  Wrn.4_NTC.32
  crRNA array
  misc_feature (148)..(157): n is a, c, g, or t
cttggctttatatatcttgtggaaaggacgaaacaccgtaatttctactaagtgtagattcgaaggacaatagatgatgtaatttctactaagtgtagatgcacgttacgcccgggtcactaatttctactaagtgtagatttttttnnnnnnnnnnaagcttggcgtggatccgatatcaactagatcttgagacaaatggcagtattcatccacaattttaaaagaaaaggggggattggggggtacagtgcaggggaaagaatagtagacataatagcaacagacatacaaactaaag

SEQ ID NO: 20137 - DNA, 301 bp, Artificial Sequence
  Wrn.4_NTC.33
  crRNA array
  misc_feature (148)..(157): n is a, c, g, or t
cttggctttatatatcttgtggaaaggacgaaacaccgtaatttctactaagtgtagattcgaaggacaatagatgatgtaatttctactaagtgtagattaagcgaccgacgcattcgctaatttctactaagtgtagatttttttnnnnnnnnnnaagcttggcgtggatccgatatcaactagatcttgagacaaatggcagtattcatccacaattttaaaagaaaaggggggattggggggtacagtgcaggggaaagaatagtagacataatagcaacagacatacaaactaaag

SEQ ID NO: 20138 - DNA, 301 bp, Artificial Sequence
  Wrn.4_NTC.34
  crRNA array
  misc_feature (148)..(157): n is a, c, g, or t
cttggctttatatatcttgtggaaaggacgaaacaccgtaatttctactaagtgtagattcgaaggacaatagatgatgtaatttctactaagtgtagattagcgttcgacacgtgaaactaatttctactaagtgtagatttttttnnnnnnnnnnaagcttggcgtggatccgatatcaactagatcttgagacaaatggcagtattcatccacaattttaaaagaaaaggggggattggggggtacagtgcaggggaaagaatagtagacataatagcaacagacatacaaactaaag

SEQ ID NO: 20139 - DNA, 301 bp, Artificial Sequence
  Wrn.4_NTC.35
  crRNA array
  misc_feature (148)..(157): n is a, c, g, or t
cttggctttatatatcttgtggaaaggacgaaacaccgtaatttctactaagtgtagattcgaaggacaatagatgatgtaatttctactaagtgtagattggcgcgtaatcgctattcgtaatttctactaagtgtagatttttttnnnnnnnnnnaagcttggcgtggatccgatatcaactagatcttgagacaaatggcagtattcatccacaattttaaaagaaaaggggggattggggggtacagtgcaggggaaagaatagtagacataatagcaacagacatacaaactaaag

SEQ ID NO: 20140 - DNA, 301 bp, Artificial Sequence
  Wrn.4_NTC.36
  crRNA array
  misc_feature (148)..(157): n is a, c, g, or t
cttggctttatatatcttgtggaaaggacgaaacaccgtaatttctactaagtgtagattcgaaggacaatagatgatgtaatttctactaagtgtagatcaacccgccgtagcgggccttaatttctactaagtgtagatttttttnnnnnnnnnnaagcttggcgtggatccgatatcaactagatcttgagacaaatggcagtattcatccacaattttaaaagaaaaggggggattggggggtacagtgcaggggaaagaatagtagacataatagcaacagacatacaaactaaag

SEQ ID NO: 20141 - DNA, 301 bp, Artificial Sequence
  Wrn.4_NTC.37
  crRNA array
  misc_feature (148)..(157): n is a, c, g, or t
cttggctttatatatcttgtggaaaggacgaaacaccgtaatttctactaagtgtagattcgaaggacaatagatgatgtaatttctactaagtgtagattttgcgttgacgcgattacttaatttctactaagtgtagatttttttnnnnnnnnnnaagcttggcgtggatccgatatcaactagatcttgagacaaatggcagtattcatccacaattttaaaagaaaaggggggattggggggtacagtgcaggggaaagaatagtagacataatagcaacagacatacaaactaaag

SEQ ID NO: 20142 - DNA, 301 bp, Artificial Sequence
  Wrn.4_NTC.38
  crRNA array
  misc_feature (148)..(157): n is a, c, g, or t
cttggctttatatatcttgtggaaaggacgaaacaccgtaatttctactaagtgtagattcgaaggacaatagatgatgtaatttctactaagtgtagataacggagcgcgatactaccataatttctactaagtgtagatttttttnnnnnnnnnnaagcttggcgtggatccgatatcaactagatcttgagacaaatggcagtattcatccacaattttaaaagaaaaggggggattggggggtacagtgcaggggaaagaatagtagacataatagcaacagacatacaaactaaag

SEQ ID NO: 20143 - DNA, 301 bp, Artificial Sequence
  Wrn.4_NTC.39
  crRNA array
  misc_feature (148)..(157): n is a, c, g, or t
cttggctttatatatcttgtggaaaggacgaaacaccgtaatttctactaagtgtagattcgaaggacaatagatgatgtaatttctactaagtgtagatccggacgttataacgtttcttaatttctactaagtgtagatttttttnnnnnnnnnnaagcttggcgtggatccgatatcaactagatcttgagacaaatggcagtattcatccacaattttaaaagaaaaggggggattggggggtacagtgcaggggaaagaatagtagacataatagcaacagacatacaaactaaag

SEQ ID NO: 20144 - DNA, 301 bp, Artificial Sequence
  Wrn.4_NTC.4
  crRNA array
  misc_feature (148)..(157): n is a, c, g, or t
cttggctttatatatcttgtggaaaggacgaaacaccgtaatttctactaagtgtagattcgaaggacaatagatgatgtaatttctactaagtgtagatatacccgtcgcgaacgtgagtaatttctactaagtgtagatttttttnnnnnnnnnnaagcttggcgtggatccgatatcaactagatcttgagacaaatggcagtattcatccacaattttaaaagaaaaggggggattggggggtacagtgcaggggaaagaatagtagacataatagcaacagacatacaaactaaag

SEQ ID NO: 20145 - DNA, 301 bp, Artificial Sequence
  Wrn.4_NTC.40
  crRNA array
  misc_feature (148)..(157): n is a, c, g, or t
cttggctttatatatcttgtggaaaggacgaaacaccgtaatttctactaagtgtagattcgaaggacaatagatgatgtaatttctactaagtgtagatattcgcgaacccggccggaataatttctactaagtgtagatttttttnnnnnnnnnnaagcttggcgtggatccgatatcaactagatcttgagacaaatggcagtattcatccacaattttaaaagaaaaggggggattggggggtacagtgcaggggaaagaatagtagacataatagcaacagacatacaaactaaag

SEQ ID NO: 20146 - DNA, 301 bp, Artificial Sequence
  Wrn.4_NTC.41
  crRNA array
  misc_feature (148)..(157): n is a, c, g, or t
cttggctttatatatcttgtggaaaggacgaaacaccgtaatttctactaagtgtagattcgaaggacaatagatgatgtaatttctactaagtgtagatttgatggcgcgacgcgttattaatttctactaagtgtagatttttttnnnnnnnnnnaagcttggcgtggatccgatatcaactagatcttgagacaaatggcagtattcatccacaattttaaaagaaaaggggggattggggggtacagtgcaggggaaagaatagtagacataatagcaacagacatacaaactaaag

SEQ ID NO: 20147 - DNA, 301 bp, Artificial Sequence
  Wrn.4_NTC.42
  crRNA array
  misc_feature (148)..(157): n is a, c, g, or t
cttggctttatatatcttgtggaaaggacgaaacaccgtaatttctactaagtgtagattcgaaggacaatagatgatgtaatttctactaagtgtagatggtcaaatcgcggcgataactaatttctactaagtgtagatttttttnnnnnnnnnnaagcttggcgtggatccgatatcaactagatcttgagacaaatggcagtattcatccacaattttaaaagaaaaggggggattggggggtacagtgcaggggaaagaatagtagacataatagcaacagacatacaaactaaag

SEQ ID NO: 20148 - DNA, 301 bp, Artificial Sequence
  Wrn.4_NTC.43
  crRNA array
  misc_feature (148)..(157): n is a, c, g, or t
cttggctttatatatcttgtggaaaggacgaaacaccgtaatttctactaagtgtagattcgaaggacaatagatgatgtaatttctactaagtgtagatcgactcgcgcattgaactggtaatttctactaagtgtagatttttttnnnnnnnnnnaagcttggcgtggatccgatatcaactagatcttgagacaaatggcagtattcatccacaattttaaaagaaaaggggggattggggggtacagtgcaggggaaagaatagtagacataatagcaacagacatacaaactaaag

SEQ ID NO: 20149 - DNA, 301 bp, Artificial Sequence
  Wrn.4_NTC.44
  crRNA array
  misc_feature (148)..(157): n is a, c, g, or t
cttggctttatatatcttgtggaaaggacgaaacaccgtaatttctactaagtgtagattcgaaggacaatagatgatgtaatttctactaagtgtagatagcgtcgtacgatttatcgttaatttctactaagtgtagatttttttnnnnnnnnnnaagcttggcgtggatccgatatcaactagatcttgagacaaatggcagtattcatccacaattttaaaagaaaaggggggattggggggtacagtgcaggggaaagaatagtagacataatagcaacagacatacaaactaaag

SEQ ID NO: 20150 - DNA, 301 bp, Artificial Sequence
  Wrn.4_NTC.45
  crRNA array
  misc_feature (148)..(157): n is a, c, g, or t
cttggctttatatatcttgtggaaaggacgaaacaccgtaatttctactaagtgtagattcgaaggacaatagatgatgtaatttctactaagtgtagatcggaacgcgtgatactagggtaatttctactaagtgtagatttttttnnnnnnnnnnaagcttggcgtggatccgatatcaactagatcttgagacaaatggcagtattcatccacaattttaaaagaaaaggggggattggggggtacagtgcaggggaaagaatagtagacataatagcaacagacatacaaactaaag

SEQ ID NO: 20151 - DNA, 301 bp, Artificial Sequence
  Wrn.4_NTC.46
  crRNA array
  misc_feature (148)..(157): n is a, c, g, or t
cttggctttatatatcttgtggaaaggacgaaacaccgtaatttctactaagtgtagattcgaaggacaatagatgatgtaatttctactaagtgtagatagcgggtcgtagacgcgcggtaatttctactaagtgtagatttttttnnnnnnnnnnaagcttggcgtggatccgatatcaactagatcttgagacaaatggcagtattcatccacaattttaaaagaaaaggggggattggggggtacagtgcaggggaaagaatagtagacataatagcaacagacatacaaactaaag

SEQ ID NO: 20152 - DNA, 301 bp, Artificial Sequence
  Wrn.4_NTC.47
  crRNA array
  misc_feature (148)..(157): n is a, c, g, or t
cttggctttatatatcttgtggaaaggacgaaacaccgtaatttctactaagtgtagattcgaaggacaatagatgatgtaatttctactaagtgtagattctcgtatcgcgattgttaataatttctactaagtgtagatttttttnnnnnnnnnnaagcttggcgtggatccgatatcaactagatcttgagacaaatggcagtattcatccacaattttaaaagaaaaggggggattggggggtacagtgcaggggaaagaatagtagacataatagcaacagacatacaaactaaag

SEQ ID NO: 20153 - DNA, 301 bp, Artificial Sequence
  Wrn.4_NTC.48
  crRNA array
  misc_feature (148)..(157): n is a, c, g, or t
cttggctttatatatcttgtggaaaggacgaaacaccgtaatttctactaagtgtagattcgaaggacaatagatgatgtaatttctactaagtgtagatcggtcgactacggctgttagtaatttctactaagtgtagatttttttnnnnnnnnnnaagcttggcgtggatccgatatcaactagatcttgagacaaatggcagtattcatccacaattttaaaagaaaaggggggattggggggtacagtgcaggggaaagaatagtagacataatagcaacagacatacaaactaaag

SEQ ID NO: 20154 - DNA, 301 bp, Artificial Sequence
  Wrn.4_NTC.49
  crRNA array
  misc_feature (148)..(157): n is a, c, g, or t
cttggctttatatatcttgtggaaaggacgaaacaccgtaatttctactaagtgtagattcgaaggacaatagatgatgtaatttctactaagtgtagattcggggcgcgtcaactgaattaatttctactaagtgtagatttttttnnnnnnnnnnaagcttggcgtggatccgatatcaactagatcttgagacaaatggcagtattcatccacaattttaaaagaaaaggggggattggggggtacagtgcaggggaaagaatagtagacataatagcaacagacatacaaactaaag

SEQ ID NO: 20155 - DNA, 301 bp, Artificial Sequence
  Wrn.4_NTC.5
  crRNA array
  misc_feature (148)..(157): n is a, c, g, or t
cttggctttatatatcttgtggaaaggacgaaacaccgtaatttctactaagtgtagattcgaaggacaatagatgatgtaatttctactaagtgtagatgcttacgcgtcgcgaatgtataatttctactaagtgtagatttttttnnnnnnnnnnaagcttggcgtggatccgatatcaactagatcttgagacaaatggcagtattcatccacaattttaaaagaaaaggggggattggggggtacagtgcaggggaaagaatagtagacataatagcaacagacatacaaactaaag

SEQ ID NO: 20156 - DNA, 301 bp, Artificial Sequence
  Wrn.4_NTC.50
  crRNA array
  misc_feature (148)..(157): n is a, c, g, or t
cttggctttatatatcttgtggaaaggacgaaacaccgtaatttctactaagtgtagattcgaaggacaatagatgatgtaatttctactaagtgtagatattgccgctcgcgcaaaatctaatttctactaagtgtagatttttttnnnnnnnnnnaagcttggcgtggatccgatatcaactagatcttgagacaaatggcagtattcatccacaattttaaaagaaaaggggggattggggggtacagtgcaggggaaagaatagtagacataatagcaacagacatacaaactaaag

SEQ ID NO: 20157 - DNA, 301 bp, Artificial Sequence
  Wrn.4_NTC.51
  crRNA array
  misc_feature (148)..(157): n is a, c, g, or t
cttggctttatatatcttgtggaaaggacgaaacaccgtaatttctactaagtgtagattcgaaggacaatagatgatgtaatttctactaagtgtagattaacgcgcaacacgccaatgtaatttctactaagtgtagatttttttnnnnnnnnnnaagcttggcgtggatccgatatcaactagatcttgagacaaatggcagtattcatccacaattttaaaagaaaaggggggattggggggtacagtgcaggggaaagaatagtagacataatagcaacagacatacaaactaaag

SEQ ID NO: 20158 - DNA, 301 bp, Artificial Sequence
  Wrn.4_NTC.6
  crRNA array
  misc_feature (148)..(157): n is a, c, g, or t
cttggctttatatatcttgtggaaaggacgaaacaccgtaatttctactaagtgtagattcgaaggacaatagatgatgtaatttctactaagtgtagatcgaatcgcgcctacgggaattaatttctactaagtgtagatttttttnnnnnnnnnnaagcttggcgtggatccgatatcaactagatcttgagacaaatggcagtattcatccacaattttaaaagaaaaggggggattggggggtacagtgcaggggaaagaatagtagacataatagcaacagacatacaaactaaag

SEQ ID NO: 20159 - DNA, 301 bp, Artificial Sequence
  Wrn.4_NTC.7
  crRNA array
  misc_feature (148)..(157): n is a, c, g, or t
cttggctttatatatcttgtggaaaggacgaaacaccgtaatttctactaagtgtagattcgaaggacaatagatgatgtaatttctactaagtgtagatcgccgaacggataagactattaatttctactaagtgtagatttttttnnnnnnnnnnaagcttggcgtggatccgatatcaactagatcttgagacaaatggcagtattcatccacaattttaaaagaaaaggggggattggggggtacagtgcaggggaaagaatagtagacataatagcaacagacatacaaactaaag

SEQ ID NO: 20160 - DNA, 301 bp, Artificial Sequence
  Wrn.4_NTC.8
  crRNA array
  misc_feature (148)..(157): n is a, c, g, or t
cttggctttatatatcttgtggaaaggacgaaacaccgtaatttctactaagtgtagattcgaaggacaatagatgatgtaatttctactaagtgtagatcgaccgaggttacgctgggataatttctactaagtgtagatttttttnnnnnnnnnnaagcttggcgtggatccgatatcaactagatcttgagacaaatggcagtattcatccacaattttaaaagaaaaggggggattggggggtacagtgcaggggaaagaatagtagacataatagcaacagacatacaaactaaag

SEQ ID NO: 20161 - DNA, 301 bp, Artificial Sequence
  Wrn.4_NTC.9
  crRNA array
  misc_feature (148)..(157): n is a, c, g, or t
cttggctttatatatcttgtggaaaggacgaaacaccgtaatttctactaagtgtagattcgaaggacaatagatgatgtaatttctactaagtgtagatatcgccgtacggctatggcataatttctactaagtgtagatttttttnnnnnnnnnnaagcttggcgtggatccgatatcaactagatcttgagacaaatggcagtattcatccacaattttaaaagaaaaggggggattggggggtacagtgcaggggaaagaatagtagacataatagcaacagacatacaaactaaag

SEQ ID NO: 20162 - DNA, 301 bp, Artificial Sequence
  Zfhx3.1_NTC.0
  crRNA array
  misc_feature (148)..(157): n is a, c, g, or t
cttggctttatatatcttgtggaaaggacgaaacaccgtaatttctactaagtgtagatcgctgcgaggtgtgtaactataatttctactaagtgtagattatagcgtcgcgcgctaatttaatttctactaagtgtagatttttttnnnnnnnnnnaagcttggcgtggatccgatatcaactagatcttgagacaaatggcagtattcatccacaattttaaaagaaaaggggggattggggggtacagtgcaggggaaagaatagtagacataatagcaacagacatacaaactaaag

SEQ ID NO: 20163 - DNA, 301 bp, Artificial Sequence
  Zfhx3.1_NTC.1
  crRNA array
  misc_feature (148)..(157): n is a, c, g, or t
cttggctttatatatcttgtggaaaggacgaaacaccgtaatttctactaagtgtagatcgctgcgaggtgtgtaactataatttctactaagtgtagatcgcgtaaccgttccggctcctaatttctactaagtgtagatttttttnnnnnnnnnnaagcttggcgtggatccgatatcaactagatcttgagacaaatggcagtattcatccacaattttaaaagaaaaggggggattggggggtacagtgcaggggaaagaatagtagacataatagcaacagacatacaaactaaag

SEQ ID NO: 20164 - DNA, 301 bp, Artificial Sequence
  Zfhx3.1_NTC.10
  crRNA array
  misc_feature (148)..(157): n is a, c, g, or t
cttggctttatatatcttgtggaaaggacgaaacaccgtaatttctactaagtgtagatcgctgcgaggtgtgtaactataatttctactaagtgtagatcgctaagttcgcgcgggccgtaatttctactaagtgtagatttttttnnnnnnnnnnaagcttggcgtggatccgatatcaactagatcttgagacaaatggcagtattcatccacaattttaaaagaaaaggggggattggggggtacagtgcaggggaaagaatagtagacataatagcaacagacatacaaactaaag

SEQ ID NO: 20165 - DNA, 301 bp, Artificial Sequence
  Zfhx3.1_NTC.11
  crRNA array
  misc_feature (148)..(157): n is a, c, g, or t
cttggctttatatatcttgtggaaaggacgaaacaccgtaatttctactaagtgtagatcgctgcgaggtgtgtaactataatttctactaagtgtagatcgttcgtcgacgaagcaatctaatttctactaagtgtagatttttttnnnnnnnnnnaagcttggcgtggatccgatatcaactagatcttgagacaaatggcagtattcatccacaattttaaaagaaaaggggggattggggggtacagtgcaggggaaagaatagtagacataatagcaacagacatacaaactaaag

SEQ ID NO: 20166 - DNA, 301 bp, Artificial Sequence
  Zfhx3.1_NTC.12
  crRNA array
  misc_feature (148)..(157): n is a, c, g, or t
cttggctttatatatcttgtggaaaggacgaaacaccgtaatttctactaagtgtagatcgctgcgaggtgtgtaactataatttctactaagtgtagatcgccgacgattaatcaatagtaatttctactaagtgtagatttttttnnnnnnnnnnaagcttggcgtggatccgatatcaactagatcttgagacaaatggcagtattcatccacaattttaaaagaaaaggggggattggggggtacagtgcaggggaaagaatagtagacataatagcaacagacatacaaactaaag

SEQ ID NO: 20167 - DNA, 301 bp, Artificial Sequence
  Zfhx3.1_NTC.13
  crRNA array
  misc_feature (148)..(157): n is a, c, g, or t
cttggctttatatatcttgtggaaaggacgaaacaccgtaatttctactaagtgtagatcgctgcgaggtgtgtaactataatttctactaagtgtagatgaccgttgtatcgcgatcaataatttctactaagtgtagatttttttnnnnnnnnnnaagcttggcgtggatccgatatcaactagatcttgagacaaatggcagtattcatccacaattttaaaagaaaaggggggattggggggtacagtgcaggggaaagaatagtagacataatagcaacagacatacaaactaaag

SEQ ID NO: 20168 - DNA, 301 bp, Artificial Sequence
  Zfhx3.1_NTC.14
  crRNA array
  misc_feature (148)..(157): n is a, c, g, or t
cttggctttatatatcttgtggaaaggacgaaacaccgtaatttctactaagtgtagatcgctgcgaggtgtgtaactataatttctactaagtgtagatccgttcgtgcgatagtgttttaatttctactaagtgtagatttttttnnnnnnnnnnaagcttggcgtggatccgatatcaactagatcttgagacaaatggcagtattcatccacaattttaaaagaaaaggggggattggggggtacagtgcaggggaaagaatagtagacataatagcaacagacatacaaactaaag

SEQ ID NO: 20169 - DNA, 301 bp, Artificial Sequence
  Zfhx3.1_NTC.15
  crRNA array
  misc_feature (148)..(157): n is a, c, g, or t
cttggctttatatatcttgtggaaaggacgaaacaccgtaatttctactaagtgtagatcgctgcgaggtgtgtaactataatttctactaagtgtagatgttgtcgtgccgcgaatttataatttctactaagtgtagatttttttnnnnnnnnnnaagcttggcgtggatccgatatcaactagatcttgagacaaatggcagtattcatccacaattttaaaagaaaaggggggattggggggtacagtgcaggggaaagaatagtagacataatagcaacagacatacaaactaaag

SEQ ID NO: 20170 - DNA, 301 bp, Artificial Sequence
  Zfhx3.1_NTC.16
  crRNA array
  misc_feature (148)..(157): n is a, c, g, or t
cttggctttatatatcttgtggaaaggacgaaacaccgtaatttctactaagtgtagatcgctgcgaggtgtgtaactataatttctactaagtgtagatcggtacgttagacgaaaatttaatttctactaagtgtagatttttttnnnnnnnnnnaagcttggcgtggatccgatatcaactagatcttgagacaaatggcagtattcatccacaattttaaaagaaaaggggggattggggggtacagtgcaggggaaagaatagtagacataatagcaacagacatacaaactaaag

SEQ ID NO: 20171 - DNA, 301 bp, Artificial Sequence
  Zfhx3.1_NTC.17
  crRNA array
  misc_feature (148)..(157): n is a, c, g, or t
cttggctttatatatcttgtggaaaggacgaaacaccgtaatttctactaagtgtagatcgctgcgaggtgtgtaactataatttctactaagtgtagattatcgaacgctatcgaacgttaatttctactaagtgtagatttttttnnnnnnnnnnaagcttggcgtggatccgatatcaactagatcttgagacaaatggcagtattcatccacaattttaaaagaaaaggggggattggggggtacagtgcaggggaaagaatagtagacataatagcaacagacatacaaactaaag

SEQ ID NO: 20172 - DNA, 301 bp, Artificial Sequence
  Zfhx3.1_NTC.18
  crRNA array
  misc_feature (148)..(157): n is a, c, g, or t
cttggctttatatatcttgtggaaaggacgaaacaccgtaatttctactaagtgtagatcgctgcgaggtgtgtaactataatttctactaagtgtagattccggttacgaccggcaaaataatttctactaagtgtagatttttttnnnnnnnnnnaagcttggcgtggatccgatatcaactagatcttgagacaaatggcagtattcatccacaattttaaaagaaaaggggggattggggggtacagtgcaggggaaagaatagtagacataatagcaacagacatacaaactaaag

SEQ ID NO: 20173 - DNA, 301 bp, Artificial Sequence
  Zfhx3.1_NTC.19
  crRNA array
  misc_feature (148)..(157): n is a, c, g, or t
cttggctttatatatcttgtggaaaggacgaaacaccgtaatttctactaagtgtagatcgctgcgaggtgtgtaactataatttctactaagtgtagatcgtcgtagaacgatacccgataatttctactaagtgtagatttttttnnnnnnnnnnaagcttggcgtggatccgatatcaactagatcttgagacaaatggcagtattcatccacaattttaaaagaaaaggggggattggggggtacagtgcaggggaaagaatagtagacataatagcaacagacatacaaactaaag

SEQ ID NO: 20174 - DNA, 301 bp, Artificial Sequence
  Zfhx3.1_NTC.2
  crRNA array
  misc_feature (148)..(157): n is a, c, g, or t
cttggctttatatatcttgtggaaaggacgaaacaccgtaatttctactaagtgtagatcgctgcgaggtgtgtaactataatttctactaagtgtagatttatgtcgcgccgcgacccgtaatttctactaagtgtagatttttttnnnnnnnnnnaagcttggcgtggatccgatatcaactagatcttgagacaaatggcagtattcatccacaattttaaaagaaaaggggggattggggggtacagtgcaggggaaagaatagtagacataatagcaacagacatacaaactaaag

SEQ ID NO: 20175 - DNA, 301 bp, Artificial Sequence
  Zfhx3.1_NTC.20
  crRNA array
  misc_feature (148)..(157): n is a, c, g, or t
cttggctttatatatcttgtggaaaggacgaaacaccgtaatttctactaagtgtagatcgctgcgaggtgtgtaactataatttctactaagtgtagatattccggcgcgaccagaagataatttctactaagtgtagatttttttnnnnnnnnnnaagcttggcgtggatccgatatcaactagatcttgagacaaatggcagtattcatccacaattttaaaagaaaaggggggattggggggtacagtgcaggggaaagaatagtagacataatagcaacagacatacaaactaaag

SEQ ID NO: 20176 - DNA, 301 bp, Artificial Sequence
  Zfhx3.1_NTC.21
  crRNA array
  misc_feature (148)..(157): n is a, c, g, or t
cttggctttatatatcttgtggaaaggacgaaacaccgtaatttctactaagtgtagatcgctgcgaggtgtgtaactataatttctactaagtgtagatgtataacttcgcgcggtccgtaatttctactaagtgtagatttttttnnnnnnnnnnaagcttggcgtggatccgatatcaactagatcttgagacaaatggcagtattcatccacaattttaaaagaaaaggggggattggggggtacagtgcaggggaaagaatagtagacataatagcaacagacatacaaactaaag

SEQ ID NO: 20177 - DNA, 301 bp, Artificial Sequence
  Zfhx3.1_NTC.22
  crRNA array
  misc_feature (148)..(157): n is a, c, g, or t
cttggctttatatatcttgtggaaaggacgaaacaccgtaatttctactaagtgtagatcgctgcgaggtgtgtaactataatttctactaagtgtagatgcgcgtcaacgtaatgtgcctaatttctactaagtgtagatttttttnnnnnnnnnnaagcttggcgtggatccgatatcaactagatcttgagacaaatggcagtattcatccacaattttaaaagaaaaggggggattggggggtacagtgcaggggaaagaatagtagacataatagcaacagacatacaaactaaag

SEQ ID NO: 20178 - DNA, 301 bp, Artificial Sequence
  Zfhx3.1_NTC.23
  crRNA array
  misc_feature (148)..(157): n is a, c, g, or t
cttggctttatatatcttgtggaaaggacgaaacaccgtaatttctactaagtgtagatcgctgcgaggtgtgtaactataatttctactaagtgtagatacgcgctattatcgtaggtgtaatttctactaagtgtagatttttttnnnnnnnnnnaagcttggcgtggatccgatatcaactagatcttgagacaaatggcagtattcatccacaattttaaaagaaaaggggggattggggggtacagtgcaggggaaagaatagtagacataatagcaacagacatacaaactaaag

SEQ ID NO: 20179 - DNA, 301 bp, Artificial Sequence
  Zfhx3.1_NTC.24
  crRNA array
  misc_feature (148)..(157): n is a, c, g, or t
cttggctttatatatcttgtggaaaggacgaaacaccgtaatttctactaagtgtagatcgctgcgaggtgtgtaactataatttctactaagtgtagatactatcgacgttcgtcccggtaatttctactaagtgtagatttttttnnnnnnnnnnaagcttggcgtggatccgatatcaactagatcttgagacaaatggcagtattcatccacaattttaaaagaaaaggggggattggggggtacagtgcaggggaaagaatagtagacataatagcaacagacatacaaactaaag

SEQ ID NO: 20180 - DNA, 301 bp, Artificial Sequence
  Zfhx3.1_NTC.25
  crRNA array
  misc_feature (148)..(157): n is a, c, g, or t
cttggctttatatatcttgtggaaaggacgaaacaccgtaatttctactaagtgtagatcgctgcgaggtgtgtaactataatttctactaagtgtagattcgcgttatcgtgccgtgcgtaatttctactaagtgtagatttttttnnnnnnnnnnaagcttggcgtggatccgatatcaactagatcttgagacaaatggcagtattcatccacaattttaaaagaaaaggggggattggggggtacagtgcaggggaaagaatagtagacataatagcaacagacatacaaactaaag

SEQ ID NO: 20181 - DNA, 301 bp, Artificial Sequence
  Zfhx3.1_NTC.26
  crRNA array
  misc_feature (148)..(157): n is a, c, g, or t
cttggctttatatatcttgtggaaaggacgaaacaccgtaatttctactaagtgtagatcgctgcgaggtgtgtaactataatttctactaagtgtagatcgcgacggcggttttaacactaatttctactaagtgtagatttttttnnnnnnnnnnaagcttggcgtggatccgatatcaactagatcttgagacaaatggcagtattcatccacaattttaaaagaaaaggggggattggggggtacagtgcaggggaaagaatagtagacataatagcaacagacatacaaactaaag

SEQ ID NO: 20182 - DNA, 301 bp, Artificial Sequence
  Zfhx3.1_NTC.27
  crRNA array
  misc_feature (148)..(157): n is a, c, g, or t
cttggctttatatatcttgtggaaaggacgaaacaccgtaatttctactaagtgtagatcgctgcgaggtgtgtaactataatttctactaagtgtagatgtcgcgttgcgaccggcgcttaatttctactaagtgtagatttttttnnnnnnnnnnaagcttggcgtggatccgatatcaactagatcttgagacaaatggcagtattcatccacaattttaaaagaaaaggggggattggggggtacagtgcaggggaaagaatagtagacataatagcaacagacatacaaactaaag

SEQ ID NO: 20183 - DNA, 301 bp, Artificial Sequence
  Zfhx3.1_NTC.28
  crRNA array
  misc_feature (148)..(157): n is a, c, g, or t
cttggctttatatatcttgtggaaaggacgaaacaccgtaatttctactaagtgtagatcgctgcgaggtgtgtaactataatttctactaagtgtagataccgctaatcggcgtaaacttaatttctactaagtgtagatttttttnnnnnnnnnnaagcttggcgtggatccgatatcaactagatcttgagacaaatggcagtattcatccacaattttaaaagaaaaggggggattggggggtacagtgcaggggaaagaatagtagacataatagcaacagacatacaaactaaag

SEQ ID NO: 20184 - DNA, 301 bp, Artificial Sequence
  Zfhx3.1_NTC.29
  crRNA array
  misc_feature (148)..(157): n is a, c, g, or t
cttggctttatatatcttgtggaaaggacgaaacaccgtaatttctactaagtgtagatcgctgcgaggtgtgtaactataatttctactaagtgtagatcgcgatctataccgtctatataatttctactaagtgtagatttttttnnnnnnnnnnaagcttggcgtggatccgatatcaactagatcttgagacaaatggcagtattcatccacaattttaaaagaaaaggggggattggggggtacagtgcaggggaaagaatagtagacataatagcaacagacatacaaactaaag

SEQ ID NO: 20185 - DNA, 301 bp, Artificial Sequence
  Zfhx3.1_NTC.3
  crRNA array
  misc_feature (148)..(157): n is a, c, g, or t
cttggctttatatatcttgtggaaaggacgaaacaccgtaatttctactaagtgtagatcgctgcgaggtgtgtaactataatttctactaagtgtagattcgacgcgagacgacgtacataatttctactaagtgtagatttttttnnnnnnnnnnaagcttggcgtggatccgatatcaactagatcttgagacaaatggcagtattcatccacaattttaaaagaaaaggggggattggggggtacagtgcaggggaaagaatagtagacataatagcaacagacatacaaactaaag

SEQ ID NO: 20186 - DNA, 301 bp, Artificial Sequence
  Zfhx3.1_NTC.30
  crRNA array
  misc_feature (148)..(157): n is a, c, g, or t
cttggctttatatatcttgtggaaaggacgaaacaccgtaatttctactaagtgtagatcgctgcgaggtgtgtaactataatttctactaagtgtagatcgatcgtacgggtgtcctaataatttctactaagtgtagatttttttnnnnnnnnnnaagcttggcgtggatccgatatcaactagatcttgagacaaatggcagtattcatccacaattttaaaagaaaaggggggattggggggtacagtgcaggggaaagaatagtagacataatagcaacagacatacaaactaaag

SEQ ID NO: 20187 - DNA, 301 bp, Artificial Sequence
  Zfhx3.1_NTC.31
  crRNA array
  misc_feature (148)..(157): n is a, c, g, or t
cttggctttatatatcttgtggaaaggacgaaacaccgtaatttctactaagtgtagatcgctgcgaggtgtgtaactataatttctactaagtgtagatgccgaccgcgtgattgtaggtaatttctactaagtgtagatttttttnnnnnnnnnnaagcttggcgtggatccgatatcaactagatcttgagacaaatggcagtattcatccacaattttaaaagaaaaggggggattggggggtacagtgcaggggaaagaatagtagacataatagcaacagacatacaaactaaag

SEQ ID NO: 20188 - DNA, 301 bp, Artificial Sequence
  Zfhx3.1_NTC.32
  crRNA array
  misc_feature (148)..(157): n is a, c, g, or t
cttggctttatatatcttgtggaaaggacgaaacaccgtaatttctactaagtgtagatcgctgcgaggtgtgtaactataatttctactaagtgtagatgcacgttacgcccgggtcactaatttctactaagtgtagatttttttnnnnnnnnnnaagcttggcgtggatccgatatcaactagatcttgagacaaatggcagtattcatccacaattttaaaagaaaaggggggattggggggtacagtgcaggggaaagaatagtagacataatagcaacagacatacaaactaaag

SEQ ID NO: 20189 - DNA, 301 bp, Artificial Sequence
  Zfhx3.1_NTC.33
  crRNA array
  misc_feature (148)..(157): n is a, c, g, or t
cttggctttatatatcttgtggaaaggacgaaacaccgtaatttctactaagtgtagatcgctgcgaggtgtgtaactataatttctactaagtgtagattaagcgaccgacgcattcgctaatttctactaagtgtagatttttttnnnnnnnnnnaagcttggcgtggatccgatatcaactagatcttgagacaaatggcagtattcatccacaattttaaaagaaaaggggggattggggggtacagtgcaggggaaagaatagtagacataatagcaacagacatacaaactaaag

SEQ ID NO: 20190 - DNA, 301 bp, Artificial Sequence
  Zfhx3.1_NTC.34
  crRNA array
  misc_feature (148)..(157): n is a, c, g, or t
cttggctttatatatcttgtggaaaggacgaaacaccgtaatttctactaagtgtagatcgctgcgaggtgtgtaactataatttctactaagtgtagattagcgttcgacacgtgaaactaatttctactaagtgtagatttttttnnnnnnnnnnaagcttggcgtggatccgatatcaactagatcttgagacaaatggcagtattcatccacaattttaaaagaaaaggggggattggggggtacagtgcaggggaaagaatagtagacataatagcaacagacatacaaactaaag

SEQ ID NO: 20191 - DNA, 301 bp, Artificial Sequence
  Zfhx3.1_NTC.35
  crRNA array
  misc_feature (148)..(157): n is a, c, g, or t
cttggctttatatatcttgtggaaaggacgaaacaccgtaatttctactaagtgtagatcgctgcgaggtgtgtaactataatttctactaagtgtagattggcgcgtaatcgctattcgtaatttctactaagtgtagatttttttnnnnnnnnnnaagcttggcgtggatccgatatcaactagatcttgagacaaatggcagtattcatccacaattttaaaagaaaaggggggattggggggtacagtgcaggggaaagaatagtagacataatagcaacagacatacaaactaaag

SEQ ID NO: 20192 - DNA, 301 bp, Artificial Sequence
  Zfhx3.1_NTC.36
  crRNA array
  misc_feature (148)..(157): n is a, c, g, or t
cttggctttatatatcttgtggaaaggacgaaacaccgtaatttctactaagtgtagatcgctgcgaggtgtgtaactataatttctactaagtgtagatcaacccgccgtagcgggccttaatttctactaagtgtagatttttttnnnnnnnnnnaagcttggcgtggatccgatatcaactagatcttgagacaaatggcagtattcatccacaattttaaaagaaaaggggggattggggggtacagtgcaggggaaagaatagtagacataatagcaacagacatacaaactaaag

SEQ ID NO: 20193 - DNA, 301 bp, Artificial Sequence
  Zfhx3.1_NTC.37
  crRNA array
  misc_feature (148)..(157): n is a, c, g, or t
cttggctttatatatcttgtggaaaggacgaaacaccgtaatttctactaagtgtagatcgctgcgaggtgtgtaactataatttctactaagtgtagattttgcgttgacgcgattacttaatttctactaagtgtagatttttttnnnnnnnnnnaagcttggcgtggatccgatatcaactagatcttgagacaaatggcagtattcatccacaattttaaaagaaaaggggggattggggggtacagtgcaggggaaagaatagtagacataatagcaacagacatacaaactaaag

SEQ ID NO: 20194 - DNA, 301 bp, Artificial Sequence
  Zfhx3.1_NTC.38
  crRNA array
  misc_feature (148)..(157): n is a, c, g, or t
cttggctttatatatcttgtggaaaggacgaaacaccgtaatttctactaagtgtagatcgctgcgaggtgtgtaactataatttctactaagtgtagataacggagcgcgatactaccataatttctactaagtgtagatttttttnnnnnnnnnnaagcttggcgtggatccgatatcaactagatcttgagacaaatggcagtattcatccacaattttaaaagaaaaggggggattggggggtacagtgcaggggaaagaatagtagacataatagcaacagacatacaaactaaag

SEQ ID NO: 20195 - DNA, 301 bp, Artificial Sequence
  Zfhx3.1_NTC.39
  crRNA array
  misc_feature (148)..(157): n is a, c, g, or t
cttggctttatatatcttgtggaaaggacgaaacaccgtaatttctactaagtgtagatcgctgcgaggtgtgtaactataatttctactaagtgtagatccggacgttataacgtttcttaatttctactaagtgtagatttttttnnnnnnnnnnaagcttggcgtggatccgatatcaactagatcttgagacaaatggcagtattcatccacaattttaaaagaaaaggggggattggggggtacagtgcaggggaaagaatagtagacataatagcaacagacatacaaactaaag

SEQ ID NO: 20196 - DNA, 301 bp, Artificial Sequence
  Zfhx3.1_NTC.4
  crRNA array
  misc_feature (148)..(157): n is a, c, g, or t
cttggctttatatatcttgtggaaaggacgaaacaccgtaatttctactaagtgtagatcgctgcgaggtgtgtaactataatttctactaagtgtagatatacccgtcgcgaacgtgagtaatttctactaagtgtagatttttttnnnnnnnnnnaagcttggcgtggatccgatatcaactagatcttgagacaaatggcagtattcatccacaattttaaaagaaaaggggggattggggggtacagtgcaggggaaagaatagtagacataatagcaacagacatacaaactaaag

SEQ ID NO: 20197 - DNA, 301 bp, Artificial Sequence
  Zfhx3.1_NTC.40
  crRNA array
  misc_feature (148)..(157): n is a, c, g, or t
cttggctttatatatcttgtggaaaggacgaaacaccgtaatttctactaagtgtagatcgctgcgaggtgtgtaactataatttctactaagtgtagatattcgcgaacccggccggaataatttctactaagtgtagatttttttnnnnnnnnnnaagcttggcgtggatccgatatcaactagatcttgagacaaatggcagtattcatccacaattttaaaagaaaaggggggattggggggtacagtgcaggggaaagaatagtagacataatagcaacagacatacaaactaaag

SEQ ID NO: 20198 - DNA, 301 bp, Artificial Sequence
  Zfhx3.1_NTC.41
  crRNA array
  misc_feature (148)..(157): n is a, c, g, or t
cttggctttatatatcttgtggaaaggacgaaacaccgtaatttctactaagtgtagatcgctgcgaggtgtgtaactataatttctactaagtgtagatttgatggcgcgacgcgttattaatttctactaagtgtagatttttttnnnnnnnnnnaagcttggcgtggatccgatatcaactagatcttgagacaaatggcagtattcatccacaattttaaaagaaaaggggggattggggggtacagtgcaggggaaagaatagtagacataatagcaacagacatacaaactaaag

SEQ ID NO: 20199 - DNA, 301 bp, Artificial Sequence
  Zfhx3.1_NTC.42
  crRNA array
  misc_feature (148)..(157): n is a, c, g, or t
cttggctttatatatcttgtggaaaggacgaaacaccgtaatttctactaagtgtagatcgctgcgaggtgtgtaactataatttctactaagtgtagatggtcaaatcgcggcgataactaatttctactaagtgtagatttttttnnnnnnnnnnaagcttggcgtggatccgatatcaactagatcttgagacaaatggcagtattcatccacaattttaaaagaaaaggggggattggggggtacagtgcaggggaaagaatagtagacataatagcaacagacatacaaactaaag

SEQ ID NO: 20200 - DNA, 301 bp, Artificial Sequence
  Zfhx3.1_NTC.43
  crRNA array
  misc_feature (148)..(157): n is a, c, g, or t
cttggctttatatatcttgtggaaaggacgaaacaccgtaatttctactaagtgtagatcgctgcgaggtgtgtaactataatttctactaagtgtagatcgactcgcgcattgaactggtaatttctactaagtgtagatttttttnnnnnnnnnnaagcttggcgtggatccgatatcaactagatcttgagacaaatggcagtattcatccacaattttaaaagaaaaggggggattggggggtacagtgcaggggaaagaatagtagacataatagcaacagacatacaaactaaag

SEQ ID NO: 20201 - DNA, 301 bp, Artificial Sequence
  Zfhx3.1_NTC.44
  crRNA array
  misc_feature (148)..(157): n is a, c, g, or t
cttggctttatatatcttgtggaaaggacgaaacaccgtaatttctactaagtgtagatcgctgcgaggtgtgtaactataatttctactaagtgtagatagcgtcgtacgatttatcgttaatttctactaagtgtagatttttttnnnnnnnnnnaagcttggcgtggatccgatatcaactagatcttgagacaaatggcagtattcatccacaattttaaaagaaaaggggggattggggggtacagtgcaggggaaagaatagtagacataatagcaacagacatacaaactaaag

SEQ ID NO: 20202 - DNA, 301 bp, Artificial Sequence
  Zfhx3.1_NTC.45
  crRNA array
  misc_feature (148)..(157): n is a, c, g, or t
cttggctttatatatcttgtggaaaggacgaaacaccgtaatttctactaagtgtagatcgctgcgaggtgtgtaactataatttctactaagtgtagatcggaacgcgtgatactagggtaatttctactaagtgtagatttttttnnnnnnnnnnaagcttggcgtggatccgatatcaactagatcttgagacaaatggcagtattcatccacaattttaaaagaaaaggggggattggggggtacagtgcaggggaaagaatagtagacataatagcaacagacatacaaactaaag

SEQ ID NO: 20203 - DNA, 301 bp, Artificial Sequence
  Zfhx3.1_NTC.46
  crRNA array
  misc_feature (148)..(157): n is a, c, g, or t
cttggctttatatatcttgtggaaaggacgaaacaccgtaatttctactaagtgtagatcgctgcgaggtgtgtaactataatttctactaagtgtagatagcgggtcgtagacgcgcggtaatttctactaagtgtagatttttttnnnnnnnnnnaagcttggcgtggatccgatatcaactagatcttgagacaaatggcagtattcatccacaattttaaaagaaaaggggggattggggggtacagtgcaggggaaagaatagtagacataatagcaacagacatacaaactaaag

SEQ ID NO: 20204 - DNA, 301 bp, Artificial Sequence
  Zfhx3.1_NTC.47
  crRNA array
  misc_feature (148)..(157): n is a, c, g, or t
cttggctttatatatcttgtggaaaggacgaaacaccgtaatttctactaagtgtagatcgctgcgaggtgtgtaactataatttctactaagtgtagattctcgtatcgcgattgttaataatttctactaagtgtagatttttttnnnnnnnnnnaagcttggcgtggatccgatatcaactagatcttgagacaaatggcagtattcatccacaattttaaaagaaaaggggggattggggggtacagtgcaggggaaagaatagtagacataatagcaacagacatacaaactaaag

SEQ ID NO: 20205 - DNA, 301 bp, Artificial Sequence
  Zfhx3.1_NTC.48
  crRNA array
  misc_feature (148)..(157): n is a, c, g, or t
cttggctttatatatcttgtggaaaggacgaaacaccgtaatttctactaagtgtagatcgctgcgaggtgtgtaactataatttctactaagtgtagatcggtcgactacggctgttagtaatttctactaagtgtagatttttttnnnnnnnnnnaagcttggcgtggatccgatatcaactagatcttgagacaaatggcagtattcatccacaattttaaaagaaaaggggggattggggggtacagtgcaggggaaagaatagtagacataatagcaacagacatacaaactaaag

SEQ ID NO: 20206 - DNA, 301 bp, Artificial Sequence
  Zfhx3.1_NTC.49
  crRNA array
  misc_feature (148)..(157): n is a, c, g, or t
cttggctttatatatcttgtggaaaggacgaaacaccgtaatttctactaagtgtagatcgctgcgaggtgtgtaactataatttctactaagtgtagattcggggcgcgtcaactgaattaatttctactaagtgtagatttttttnnnnnnnnnnaagcttggcgtggatccgatatcaactagatcttgagacaaatggcagtattcatccacaattttaaaagaaaaggggggattggggggtacagtgcaggggaaagaatagtagacataatagcaacagacatacaaactaaag

SEQ ID NO: 20207 - DNA, 301 bp, Artificial Sequence
  Zfhx3.1_NTC.5
  crRNA array
  misc_feature (148)..(157): n is a, c, g, or t
cttggctttatatatcttgtggaaaggacgaaacaccgtaatttctactaagtgtagatcgctgcgaggtgtgtaactataatttctactaagtgtagatgcttacgcgtcgcgaatgtataatttctactaagtgtagatttttttnnnnnnnnnnaagcttggcgtggatccgatatcaactagatcttgagacaaatggcagtattcatccacaattttaaaagaaaaggggggattggggggtacagtgcaggggaaagaatagtagacataatagcaacagacatacaaactaaag

SEQ ID NO: 20208 - DNA, 301 bp, Artificial Sequence
  Zfhx3.1_NTC.50
  crRNA array
  misc_feature (148)..(157): n is a, c, g, or t
cttggctttatatatcttgtggaaaggacgaaacaccgtaatttctactaagtgtagatcgctgcgaggtgtgtaactataatttctactaagtgtagatattgccgctcgcgcaaaatctaatttctactaagtgtagatttttttnnnnnnnnnnaagcttggcgtggatccgatatcaactagatcttgagacaaatggcagtattcatccacaattttaaaagaaaaggggggattggggggtacagtgcaggggaaagaatagtagacataatagcaacagacatacaaactaaag

SEQ ID NO: 20209 - DNA, 301 bp, Artificial Sequence
  Zfhx3.1_NTC.51
  crRNA array
  misc_feature (148)..(157): n is a, c, g, or t
cttggctttatatatcttgtggaaaggacgaaacaccgtaatttctactaagtgtagatcgctgcgaggtgtgtaactataatttctactaagtgtagattaacgcgcaacacgccaatgtaatttctactaagtgtagatttttttnnnnnnnnnnaagcttggcgtggatccgatatcaactagatcttgagacaaatggcagtattcatccacaattttaaaagaaaaggggggattggggggtacagtgcaggggaaagaatagtagacataatagcaacagacatacaaactaaag

SEQ ID NO: 20210 - DNA, 301 bp, Artificial Sequence
  Zfhx3.1_NTC.6
  crRNA array
  misc_feature (148)..(157): n is a, c, g, or t
cttggctttatatatcttgtggaaaggacgaaacaccgtaatttctactaagtgtagatcgctgcgaggtgtgtaactataatttctactaagtgtagatcgaatcgcgcctacgggaattaatttctactaagtgtagatttttttnnnnnnnnnnaagcttggcgtggatccgatatcaactagatcttgagacaaatggcagtattcatccacaattttaaaagaaaaggggggattggggggtacagtgcaggggaaagaatagtagacataatagcaacagacatacaaactaaag

SEQ ID NO: 20211 - DNA, 301 bp, Artificial Sequence
  Zfhx3.1_NTC.7
  crRNA array
  misc_feature (148)..(157): n is a, c, g, or t
cttggctttatatatcttgtggaaaggacgaaacaccgtaatttctactaagtgtagatcgctgcgaggtgtgtaactataatttctactaagtgtagatcgccgaacggataagactattaatttctactaagtgtagatttttttnnnnnnnnnnaagcttggcgtggatccgatatcaactagatcttgagacaaatggcagtattcatccacaattttaaaagaaaaggggggattggggggtacagtgcaggggaaagaatagtagacataatagcaacagacatacaaactaaag

SEQ ID NO: 20212 - DNA, 301 bp, Artificial Sequence
  Zfhx3.1_NTC.8
  crRNA array
  misc_feature (148)..(157): n is a, c, g, or t
cttggctttatatatcttgtggaaaggacgaaacaccgtaatttctactaagtgtagatcgctgcgaggtgtgtaactataatttctactaagtgtagatcgaccgaggttacgctgggataatttctactaagtgtagatttttttnnnnnnnnnnaagcttggcgtggatccgatatcaactagatcttgagacaaatggcagtattcatccacaattttaaaagaaaaggggggattggggggtacagtgcaggggaaagaatagtagacataatagcaacagacatacaaactaaag

SEQ ID NO: 20213 - DNA, 301 bp, Artificial Sequence
  Zfhx3.1_NTC.9
  crRNA array
  misc_feature (148)..(157): n is a, c, g, or t
cttggctttatatatcttgtggaaaggacgaaacaccgtaatttctactaagtgtagatcgctgcgaggtgtgtaactataatttctactaagtgtagatatcgccgtacggctatggcataatttctactaagtgtagatttttttnnnnnnnnnnaagcttggcgtggatccgatatcaactagatcttgagacaaatggcagtattcatccacaattttaaaagaaaaggggggattggggggtacagtgcaggggaaagaatagtagacataatagcaacagacatacaaactaaag

SEQ ID NO: 20214 - DNA, 301 bp, Artificial Sequence
  Zfhx3.2_NTC.0
  crRNA array
  misc_feature (148)..(157): n is a, c, g, or t
cttggctttatatatcttgtggaaaggacgaaacaccgtaatttctactaagtgtagatacgtgcgacacaaaagcaactaatttctactaagtgtagattatagcgtcgcgcgctaatttaatttctactaagtgtagatttttttnnnnnnnnnnaagcttggcgtggatccgatatcaactagatcttgagacaaatggcagtattcatccacaattttaaaagaaaaggggggattggggggtacagtgcaggggaaagaatagtagacataatagcaacagacatacaaactaaag

SEQ ID NO: 20215 - DNA, 301 bp, Artificial Sequence
  Zfhx3.2_NTC.1
  crRNA array
  misc_feature (148)..(157): n is a, c, g, or t
cttggctttatatatcttgtggaaaggacgaaacaccgtaatttctactaagtgtagatacgtgcgacacaaaagcaactaatttctactaagtgtagatcgcgtaaccgttccggctcctaatttctactaagtgtagatttttttnnnnnnnnnnaagcttggcgtggatccgatatcaactagatcttgagacaaatggcagtattcatccacaattttaaaagaaaaggggggattggggggtacagtgcaggggaaagaatagtagacataatagcaacagacatacaaactaaag

SEQ ID NO: 20216 - DNA, 301 bp, Artificial Sequence
  Zfhx3.2_NTC.10
  crRNA array
  misc_feature (148)..(157): n is a, c, g, or t
cttggctttatatatcttgtggaaaggacgaaacaccgtaatttctactaagtgtagatacgtgcgacacaaaagcaactaatttctactaagtgtagatcgctaagttcgcgcgggccgtaatttctactaagtgtagatttttttnnnnnnnnnnaagcttggcgtggatccgatatcaactagatcttgagacaaatggcagtattcatccacaattttaaaagaaaaggggggattggggggtacagtgcaggggaaagaatagtagacataatagcaacagacatacaaactaaag

SEQ ID NO: 20217 - DNA, 301 bp, Artificial Sequence
  Zfhx3.2_NTC.11
  crRNA array
  misc_feature (148)..(157): n is a, c, g, or t
cttggctttatatatcttgtggaaaggacgaaacaccgtaatttctactaagtgtagatacgtgcgacacaaaagcaactaatttctactaagtgtagatcgttcgtcgacgaagcaatctaatttctactaagtgtagatttttttnnnnnnnnnnaagcttggcgtggatccgatatcaactagatcttgagacaaatggcagtattcatccacaattttaaaagaaaaggggggattggggggtacagtgcaggggaaagaatagtagacataatagcaacagacatacaaactaaag

SEQ ID NO: 20218 - DNA, 301 bp, Artificial Sequence
  Zfhx3.2_NTC.12
  crRNA array
  misc_feature (148)..(157): n is a, c, g, or t
cttggctttatatatcttgtggaaaggacgaaacaccgtaatttctactaagtgtagatacgtgcgacacaaaagcaactaatttctactaagtgtagatcgccgacgattaatcaatagtaatttctactaagtgtagatttttttnnnnnnnnnnaagcttggcgtggatccgatatcaactagatcttgagacaaatggcagtattcatccacaattttaaaagaaaaggggggattggggggtacagtgcaggggaaagaatagtagacataatagcaacagacatacaaactaaag

SEQ ID NO: 20219 - DNA, 301 bp, Artificial Sequence
  Zfhx3.2_NTC.13
  crRNA array
  misc_feature (148)..(157): n is a, c, g, or t
cttggctttatatatcttgtggaaaggacgaaacaccgtaatttctactaagtgtagatacgtgcgacacaaaagcaactaatttctactaagtgtagatgaccgttgtatcgcgatcaataatttctactaagtgtagatttttttnnnnnnnnnnaagcttggcgtggatccgatatcaactagatcttgagacaaatggcagtattcatccacaattttaaaagaaaaggggggattggggggtacagtgcaggggaaagaatagtagacataatagcaacagacatacaaactaaag

SEQ ID NO: 20220 - DNA, 301 bp, Artificial Sequence
  Zfhx3.2_NTC.14
  crRNA array
  misc_feature (148)..(157): n is a, c, g, or t
cttggctttatatatcttgtggaaaggacgaaacaccgtaatttctactaagtgtagatacgtgcgacacaaaagcaactaatttctactaagtgtagatccgttcgtgcgatagtgttttaatttctactaagtgtagatttttttnnnnnnnnnnaagcttggcgtggatccgatatcaactagatcttgagacaaatggcagtattcatccacaattttaaaagaaaaggggggattggggggtacagtgcaggggaaagaatagtagacataatagcaacagacatacaaactaaag

SEQ ID NO: 20221 - DNA, 301 bp, Artificial Sequence
  Zfhx3.2_NTC.15
  crRNA array
  misc_feature (148)..(157): n is a, c, g, or t
cttggctttatatatcttgtggaaaggacgaaacaccgtaatttctactaagtgtagatacgtgcgacacaaaagcaactaatttctactaagtgtagatgttgtcgtgccgcgaatttataatttctactaagtgtagatttttttnnnnnnnnnnaagcttggcgtggatccgatatcaactagatcttgagacaaatggcagtattcatccacaattttaaaagaaaaggggggattggggggtacagtgcaggggaaagaatagtagacataatagcaacagacatacaaactaaag

SEQ ID NO: 20222 - DNA, 301 bp, Artificial Sequence
  Zfhx3.2_NTC.16
  crRNA array
  misc_feature (148)..(157): n is a, c, g, or t
cttggctttatatatcttgtggaaaggacgaaacaccgtaatttctactaagtgtagatacgtgcgacacaaaagcaactaatttctactaagtgtagatcggtacgttagacgaaaatttaatttctactaagtgtagatttttttnnnnnnnnnnaagcttggcgtggatccgatatcaactagatcttgagacaaatggcagtattcatccacaattttaaaagaaaaggggggattggggggtacagtgcaggggaaagaatagtagacataatagcaacagacatacaaactaaag

SEQ ID NO: 20223 - DNA, 301 bp, Artificial Sequence
  Zfhx3.2_NTC.17
  crRNA array
  misc_feature (148)..(157): n is a, c, g, or t
cttggctttatatatcttgtggaaaggacgaaacaccgtaatttctactaagtgtagatacgtgcgacacaaaagcaactaatttctactaagtgtagattatcgaacgctatcgaacgttaatttctactaagtgtagatttttttnnnnnnnnnnaagcttggcgtggatccgatatcaactagatcttgagacaaatggcagtattcatccacaattttaaaagaaaaggggggattggggggtacagtgcaggggaaagaatagtagacataatagcaacagacatacaaactaaag

SEQ ID NO: 20224 - DNA, 301 bp, Artificial Sequence
  Zfhx3.2_NTC.18
  crRNA array
  misc_feature (148)..(157): n is a, c, g, or t
cttggctttatatatcttgtggaaaggacgaaacaccgtaatttctactaagtgtagatacgtgcgacacaaaagcaactaatttctactaagtgtagattccggttacgaccggcaaaataatttctactaagtgtagatttttttnnnnnnnnnnaagcttggcgtggatccgatatcaactagatcttgagacaaatggcagtattcatccacaattttaaaagaaaaggggggattggggggtacagtgcaggggaaagaatagtagacataatagcaacagacatacaaactaaag

SEQ ID NO: 20225 - DNA, 301 bp, Artificial Sequence
  Zfhx3.2_NTC.19
  crRNA array
  misc_feature (148)..(157): n is a, c, g, or t
cttggctttatatatcttgtggaaaggacgaaacaccgtaatttctactaagtgtagatacgtgcgacacaaaagcaactaatttctactaagtgtagatcgtcgtagaacgatacccgataatttctactaagtgtagatttttttnnnnnnnnnnaagcttggcgtggatccgatatcaactagatcttgagacaaatggcagtattcatccacaattttaaaagaaaaggggggattggggggtacagtgcaggggaaagaatagtagacataatagcaacagacatacaaactaaag

SEQ ID NO: 20226 - DNA, 301 bp, Artificial Sequence
  Zfhx3.2_NTC.2
  crRNA array
  misc_feature (148)..(157): n is a, c, g, or t
cttggctttatatatcttgtggaaaggacgaaacaccgtaatttctactaagtgtagatacgtgcgacacaaaagcaactaatttctactaagtgtagatttatgtcgcgccgcgacccgtaatttctactaagtgtagatttttttnnnnnnnnnnaagcttggcgtggatccgatatcaactagatcttgagacaaatggcagtattcatccacaattttaaaagaaaaggggggattggggggtacagtgcaggggaaagaatagtagacataatagcaacagacatacaaactaaag

SEQ ID NO: 20227 - DNA, 301 bp, Artificial Sequence
  Zfhx3.2_NTC.20
  crRNA array
  misc_feature (148)..(157): n is a, c, g, or t
cttggctttatatatcttgtggaaaggacgaaacaccgtaatttctactaagtgtagatacgtgcgacacaaaagcaactaatttctactaagtgtagatattccggcgcgaccagaagataatttctactaagtgtagatttttttnnnnnnnnnnaagcttggcgtggatccgatatcaactagatcttgagacaaatggcagtattcatccacaattttaaaagaaaaggggggattggggggtacagtgcaggggaaagaatagtagacataatagcaacagacatacaaactaaag

SEQ ID NO: 20228 - DNA, 301 bp, Artificial Sequence
  Zfhx3.2_NTC.21
  crRNA array
  misc_feature (148)..(157): n is a, c, g, or t
cttggctttatatatcttgtggaaaggacgaaacaccgtaatttctactaagtgtagatacgtgcgacacaaaagcaactaatttctactaagtgtagatgtataacttcgcgcggtccgtaatttctactaagtgtagatttttttnnnnnnnnnnaagcttggcgtggatccgatatcaactagatcttgagacaaatggcagtattcatccacaattttaaaagaaaaggggggattggggggtacagtgcaggggaaagaatagtagacataatagcaacagacatacaaactaaag

SEQ ID NO: 20229 - DNA, 301 bp, Artificial Sequence
  Zfhx3.2_NTC.22
  crRNA array
  misc_feature (148)..(157): n is a, c, g, or t
cttggctttatatatcttgtggaaaggacgaaacaccgtaatttctactaagtgtagatacgtgcgacacaaaagcaactaatttctactaagtgtagatgcgcgtcaacgtaatgtgcctaatttctactaagtgtagatttttttnnnnnnnnnnaagcttggcgtggatccgatatcaactagatcttgagacaaatggcagtattcatccacaattttaaaagaaaaggggggattggggggtacagtgcaggggaaagaatagtagacataatagcaacagacatacaaactaaag

SEQ ID NO: 20230 - DNA, 301 bp, Artificial Sequence
  Zfhx3.2_NTC.23
  crRNA array
  misc_feature (148)..(157): n is a, c, g, or t
cttggctttatatatcttgtggaaaggacgaaacaccgtaatttctactaagtgtagatacgtgcgacacaaaagcaactaatttctactaagtgtagatacgcgctattatcgtaggtgtaatttctactaagtgtagatttttttnnnnnnnnnnaagcttggcgtggatccgatatcaactagatcttgagacaaatggcagtattcatccacaattttaaaagaaaaggggggattggggggtacagtgcaggggaaagaatagtagacataatagcaacagacatacaaactaaag

SEQ ID NO: 20231 - DNA, 301 bp, Artificial Sequence
  Zfhx3.2_NTC.24
  crRNA array
  misc_feature (148)..(157): n is a, c, g, or t
cttggctttatatatcttgtggaaaggacgaaacaccgtaatttctactaagtgtagatacgtgcgacacaaaagcaactaatttctactaagtgtagatactatcgacgttcgtcccggtaatttctactaagtgtagatttttttnnnnnnnnnnaagcttggcgtggatccgatatcaactagatcttgagacaaatggcagtattcatccacaattttaaaagaaaaggggggattggggggtacagtgcaggggaaagaatagtagacataatagcaacagacatacaaactaaag

SEQ ID NO: 20232 - DNA, 301 bp, Artificial Sequence
  Zfhx3.2_NTC.25
  crRNA array
  misc_feature (148)..(157): n is a, c, g, or t
cttggctttatatatcttgtggaaaggacgaaacaccgtaatttctactaagtgtagatacgtgcgacacaaaagcaactaatttctactaagtgtagattcgcgttatcgtgccgtgcgtaatttctactaagtgtagatttttttnnnnnnnnnnaagcttggcgtggatccgatatcaactagatcttgagacaaatggcagtattcatccacaattttaaaagaaaaggggggattggggggtacagtgcaggggaaagaatagtagacataatagcaacagacatacaaactaaag

SEQ ID NO: 20233 - DNA, 301 bp, Artificial Sequence
  Zfhx3.2_NTC.26
  crRNA array
  misc_feature (148)..(157): n is a, c, g, or t
cttggctttatatatcttgtggaaaggacgaaacaccgtaatttctactaagtgtagatacgtgcgacacaaaagcaactaatttctactaagtgtagatcgcgacggcggttttaacactaatttctactaagtgtagatttttttnnnnnnnnnnaagcttggcgtggatccgatatcaactagatcttgagacaaatggcagtattcatccacaattttaaaagaaaaggggggattggggggtacagtgcaggggaaagaatagtagacataatagcaacagacatacaaactaaag

SEQ ID NO: 20234 - DNA, 301 bp, Artificial Sequence
  Zfhx3.2_NTC.27
  crRNA array
  misc_feature (148)..(157): n is a, c, g, or t
cttggctttatatatcttgtggaaaggacgaaacaccgtaatttctactaagtgtagatacgtgcgacacaaaagcaactaatttctactaagtgtagatgtcgcgttgcgaccggcgcttaatttctactaagtgtagatttttttnnnnnnnnnnaagcttggcgtggatccgatatcaactagatcttgagacaaatggcagtattcatccacaattttaaaagaaaaggggggattggggggtacagtgcaggggaaagaatagtagacataatagcaacagacatacaaactaaag

SEQ ID NO: 20235 - DNA, 301 bp, Artificial Sequence
  Zfhx3.2_NTC.28
  crRNA array
  misc_feature (148)..(157): n is a, c, g, or t
cttggctttatatatcttgtggaaaggacgaaacaccgtaatttctactaagtgtagatacgtgcgacacaaaagcaactaatttctactaagtgtagataccgctaatcggcgtaaacttaatttctactaagtgtagatttttttnnnnnnnnnnaagcttggcgtggatccgatatcaactagatcttgagacaaatggcagtattcatccacaattttaaaagaaaaggggggattggggggtacagtgcaggggaaagaatagtagacataatagcaacagacatacaaactaaag

SEQ ID NO: 20236 - DNA, 301 bp, Artificial Sequence
  Zfhx3.2_NTC.29
  crRNA array
  misc_feature (148)..(157): n is a, c, g, or t
cttggctttatatatcttgtggaaaggacgaaacaccgtaatttctactaagtgtagatacgtgcgacacaaaagcaactaatttctactaagtgtagatcgcgatctataccgtctatataatttctactaagtgtagatttttttnnnnnnnnnnaagcttggcgtggatccgatatcaactagatcttgagacaaatggcagtattcatccacaattttaaaagaaaaggggggattggggggtacagtgcaggggaaagaatagtagacataatagcaacagacatacaaactaaag

SEQ ID NO: 20237 - DNA, 301 bp, Artificial Sequence
  Zfhx3.2_NTC.3
  crRNA array
  misc_feature (148)..(157): n is a, c, g, or t
cttggctttatatatcttgtggaaaggacgaaacaccgtaatttctactaagtgtagatacgtgcgacacaaaagcaactaatttctactaagtgtagattcgacgcgagacgacgtacataatttctactaagtgtagatttttttnnnnnnnnnnaagcttggcgtggatccgatatcaactagatcttgagacaaatggcagtattcatccacaattttaaaagaaaaggggggattggggggtacagtgcaggggaaagaatagtagacataatagcaacagacatacaaactaaag

SEQ ID NO: 20238 - DNA, 301 bp, Artificial Sequence
  Zfhx3.2_NTC.30
  crRNA array
  misc_feature (148)..(157): n is a, c, g, or t
cttggctttatatatcttgtggaaaggacgaaacaccgtaatttctactaagtgtagatacgtgcgacacaaaagcaactaatttctactaagtgtagatcgatcgtacgggtgtcctaataatttctactaagtgtagatttttttnnnnnnnnnnaagcttggcgtggatccgatatcaactagatcttgagacaaatggcagtattcatccacaattttaaaagaaaaggggggattggggggtacagtgcaggggaaagaatagtagacataatagcaacagacatacaaactaaag

SEQ ID NO: 20239 - DNA, 301 bp, Artificial Sequence
  Zfhx3.2_NTC.31
  crRNA array
  misc_feature (148)..(157): n is a, c, g, or t
cttggctttatatatcttgtggaaaggacgaaacaccgtaatttctactaagtgtagatacgtgcgacacaaaagcaactaatttctactaagtgtagatgccgaccgcgtgattgtaggtaatttctactaagtgtagatttttttnnnnnnnnnnaagcttggcgtggatccgatatcaactagatcttgagacaaatggcagtattcatccacaattttaaaagaaaaggggggattggggggtacagtgcaggggaaagaatagtagacataatagcaacagacatacaaactaaag

SEQ ID NO: 20240 - DNA, 301 bp, Artificial Sequence
  Zfhx3.2_NTC.32
  crRNA array
  misc_feature (148)..(157): n is a, c, g, or t
cttggctttatatatcttgtggaaaggacgaaacaccgtaatttctactaagtgtagatacgtgcgacacaaaagcaactaatttctactaagtgtagatgcacgttacgcccgggtcactaatttctactaagtgtagatttttttnnnnnnnnnnaagcttggcgtggatccgatatcaactagatcttgagacaaatggcagtattcatccacaattttaaaagaaaaggggggattggggggtacagtgcaggggaaagaatagtagacataatagcaacagacatacaaactaaag

SEQ ID NO: 20241 - DNA, 301 bp, Artificial Sequence
  Zfhx3.2_NTC.33
  crRNA array
  misc_feature (148)..(157): n is a, c, g, or t
cttggctttatatatcttgtggaaaggacgaaacaccgtaatttctactaagtgtagatacgtgcgacacaaaagcaactaatttctactaagtgtagattaagcgaccgacgcattcgctaatttctactaagtgtagatttttttnnnnnnnnnnaagcttggcgtggatccgatatcaactagatcttgagacaaatggcagtattcatccacaattttaaaagaaaaggggggattggggggtacagtgcaggggaaagaatagtagacataatagcaacagacatacaaactaaag

SEQ ID NO: 20242 - DNA, 301 bp, Artificial Sequence
  Zfhx3.2_NTC.34
  crRNA array
  misc_feature (148)..(157): n is a, c, g, or t
cttggctttatatatcttgtggaaaggacgaaacaccgtaatttctactaagtgtagatacgtgcgacacaaaagcaactaatttctactaagtgtagattagcgttcgacacgtgaaactaatttctactaagtgtagatttttttnnnnnnnnnnaagcttggcgtggatccgatatcaactagatcttgagacaaatggcagtattcatccacaattttaaaagaaaaggggggattggggggtacagtgcaggggaaagaatagtagacataatagcaacagacatacaaactaaag

SEQ ID NO: 20243 - DNA, 301 bp, Artificial Sequence
  Zfhx3.2_NTC.35
  crRNA array
  misc_feature (148)..(157): n is a, c, g, or t
cttggctttatatatcttgtggaaaggacgaaacaccgtaatttctactaagtgtagatacgtgcgacacaaaagcaactaatttctactaagtgtagattggcgcgtaatcgctattcgtaatttctactaagtgtagatttttttnnnnnnnnnnaagcttggcgtggatccgatatcaactagatcttgagacaaatggcagtattcatccacaattttaaaagaaaaggggggattggggggtacagtgcaggggaaagaatagtagacataatagcaacagacatacaaactaaag

SEQ ID NO: 20244 - DNA, 301 bp, Artificial Sequence
  Zfhx3.2_NTC.36
  crRNA array
  misc_feature (148)..(157): n is a, c, g, or t
cttggctttatatatcttgtggaaaggacgaaacaccgtaatttctactaagtgtagatacgtgcgacacaaaagcaactaatttctactaagtgtagatcaacccgccgtagcgggccttaatttctactaagtgtagatttttttnnnnnnnnnnaagcttggcgtggatccgatatcaactagatcttgagacaaatggcagtattcatccacaattttaaaagaaaaggggggattggggggtacagtgcaggggaaagaatagtagacataatagcaacagacatacaaactaaag

SEQ ID NO: 20245 - DNA, 301 bp, Artificial Sequence
  Zfhx3.2_NTC.37
  crRNA array
  misc_feature (148)..(157): n is a, c, g, or t
cttggctttatatatcttgtggaaaggacgaaacaccgtaatttctactaagtgtagatacgtgcgacacaaaagcaactaatttctactaagtgtagattttgcgttgacgcgattacttaatttctactaagtgtagatttttttnnnnnnnnnnaagcttggcgtggatccgatatcaactagatcttgagacaaatggcagtattcatccacaattttaaaagaaaaggggggattggggggtacagtgcaggggaaagaatagtagacataatagcaacagacatacaaactaaag

SEQ ID NO: 20246 - DNA, 301 bp, Artificial Sequence
  Zfhx3.2_NTC.38
  crRNA array
  misc_feature (148)..(157): n is a, c, g, or t
cttggctttatatatcttgtggaaaggacgaaacaccgtaatttctactaagtgtagatacgtgcgacacaaaagcaactaatttctactaagtgtagataacggagcgcgatactaccataatttctactaagtgtagatttttttnnnnnnnnnnaagcttggcgtggatccgatatcaactagatcttgagacaaatggcagtattcatccacaattttaaaagaaaaggggggattggggggtacagtgcaggggaaagaatagtagacataatagcaacagacatacaaactaaag

SEQ ID NO: 20247 - DNA, 301 bp, Artificial Sequence
  Zfhx3.2_NTC.39
  crRNA array
  misc_feature (148)..(157): n is a, c, g, or t
cttggctttatatatcttgtggaaaggacgaaacaccgtaatttctactaagtgtagatacgtgcgacacaaaagcaactaatttctactaagtgtagatccggacgttataacgtttcttaatttctactaagtgtagatttttttnnnnnnnnnnaagcttggcgtggatccgatatcaactagatcttgagacaaatggcagtattcatccacaattttaaaagaaaaggggggattggggggtacagtgcaggggaaagaatagtagacataatagcaacagacatacaaactaaag

SEQ ID NO: 20248 - DNA, 301 bp, Artificial Sequence
  Zfhx3.2_NTC.4
  crRNA array
  misc_feature (148)..(157): n is a, c, g, or t
cttggctttatatatcttgtggaaaggacgaaacaccgtaatttctactaagtgtagatacgtgcgacacaaaagcaactaatttctactaagtgtagatatacccgtcgcgaacgtgagtaatttctactaagtgtagatttttttnnnnnnnnnnaagcttggcgtggatccgatatcaactagatcttgagacaaatggcagtattcatccacaattttaaaagaaaaggggggattggggggtacagtgcaggggaaagaatagtagacataatagcaacagacatacaaactaaag

SEQ ID NO: 20249 - DNA, 301 bp, Artificial Sequence
  Zfhx3.2_NTC.40
  crRNA array
  misc_feature (148)..(157): n is a, c, g, or t
cttggctttatatatcttgtggaaaggacgaaacaccgtaatttctactaagtgtagatacgtgcgacacaaaagcaactaatttctactaagtgtagatattcgcgaacccggccggaataatttctactaagtgtagatttttttnnnnnnnnnnaagcttggcgtggatccgatatcaactagatcttgagacaaatggcagtattcatccacaattttaaaagaaaaggggggattggggggtacagtgcaggggaaagaatagtagacataatagcaacagacatacaaactaaag

SEQ ID NO: 20250 - DNA, 301 bp, Artificial Sequence
  Zfhx3.2_NTC.41
  crRNA array
  misc_feature (148)..(157): n is a, c, g, or t
cttggctttatatatcttgtggaaaggacgaaacaccgtaatttctactaagtgtagatacgtgcgacacaaaagcaactaatttctactaagtgtagatttgatggcgcgacgcgttattaatttctactaagtgtagatttttttnnnnnnnnnnaagcttggcgtggatccgatatcaactagatcttgagacaaatggcagtattcatccacaattttaaaagaaaaggggggattggggggtacagtgcaggggaaagaatagtagacataatagcaacagacatacaaactaaag

SEQ ID NO: 20251 - DNA, 301 bp, Artificial Sequence
  Zfhx3.2_NTC.42
  crRNA array
  misc_feature (148)..(157): n is a, c, g, or t
cttggctttatatatcttgtggaaaggacgaaacaccgtaatttctactaagtgtagatacgtgcgacacaaaagcaactaatttctactaagtgtagatggtcaaatcgcggcgataactaatttctactaagtgtagatttttttnnnnnnnnnnaagcttggcgtggatccgatatcaactagatcttgagacaaatggcagtattcatccacaattttaaaagaaaaggggggattggggggtacagtgcaggggaaagaatagtagacataatagcaacagacatacaaactaaag

SEQ ID NO: 20252 - DNA, 301 bp, Artificial Sequence
  Zfhx3.2_NTC.43
  crRNA array
  misc_feature (148)..(157): n is a, c, g, or t
cttggctttatatatcttgtggaaaggacgaaacaccgtaatttctactaagtgtagatacgtgcgacacaaaagcaactaatttctactaagtgtagatcgactcgcgcattgaactggtaatttctactaagtgtagatttttttnnnnnnnnnnaagcttggcgtggatccgatatcaactagatcttgagacaaatggcagtattcatccacaattttaaaagaaaaggggggattggggggtacagtgcaggggaaagaatagtagacataatagcaacagacatacaaactaaag

SEQ ID NO: 20253 - DNA, 301 bp, Artificial Sequence
  Zfhx3.2_NTC.44
  crRNA array
  misc_feature (148)..(157): n is a, c, g, or t
cttggctttatatatcttgtggaaaggacgaaacaccgtaatttctactaagtgtagatacgtgcgacacaaaagcaactaatttctactaagtgtagatagcgtcgtacgatttatcgttaatttctactaagtgtagatttttttnnnnnnnnnnaagcttggcgtggatccgatatcaactagatcttgagacaaatggcagtattcatccacaattttaaaagaaaaggggggattggggggtacagtgcaggggaaagaatagtagacataatagcaacagacatacaaactaaag

SEQ ID NO: 20254 - DNA, 301 bp, Artificial Sequence
  Zfhx3.2_NTC.45
  crRNA array
  misc_feature (148)..(157): n is a, c, g, or t
cttggctttatatatcttgtggaaaggacgaaacaccgtaatttctactaagtgtagatacgtgcgacacaaaagcaactaatttctactaagtgtagatcggaacgcgtgatactagggtaatttctactaagtgtagatttttttnnnnnnnnnnaagcttggcgtggatccgatatcaactagatcttgagacaaatggcagtattcatccacaattttaaaagaaaaggggggattggggggtacagtgcaggggaaagaatagtagacataatagcaacagacatacaaactaaag

SEQ ID NO: 20255 - DNA, 301 bp, Artificial Sequence
  Zfhx3.2_NTC.46
  crRNA array
  misc_feature (148)..(157): n is a, c, g, or t
cttggctttatatatcttgtggaaaggacgaaacaccgtaatttctactaagtgtagatacgtgcgacacaaaagcaactaatttctactaagtgtagatagcgggtcgtagacgcgcggtaatttctactaagtgtagatttttttnnnnnnnnnnaagcttggcgtggatccgatatcaactagatcttgagacaaatggcagtattcatccacaattttaaaagaaaaggggggattggggggtacagtgcaggggaaagaatagtagacataatagcaacagacatacaaactaaag

SEQ ID NO: 20256 - DNA, 301 bp, Artificial Sequence
  Zfhx3.2_NTC.47
  crRNA array
  misc_feature (148)..(157): n is a, c, g, or t
cttggctttatatatcttgtggaaaggacgaaacaccgtaatttctactaagtgtagatacgtgcgacacaaaagcaactaatttctactaagtgtagattctcgtatcgcgattgttaataatttctactaagtgtagatttttttnnnnnnnnnnaagcttggcgtggatccgatatcaactagatcttgagacaaatggcagtattcatccacaattttaaaagaaaaggggggattggggggtacagtgcaggggaaagaatagtagacataatagcaacagacatacaaactaaag

SEQ ID NO: 20257 - DNA, 301 bp, Artificial Sequence
  Zfhx3.2_NTC.48
  crRNA array
  misc_feature (148)..(157): n is a, c, g, or t
cttggctttatatatcttgtggaaaggacgaaacaccgtaatttctactaagtgtagatacgtgcgacacaaaagcaactaatttctactaagtgtagatcggtcgactacggctgttagtaatttctactaagtgtagatttttttnnnnnnnnnnaagcttggcgtggatccgatatcaactagatcttgagacaaatggcagtattcatccacaattttaaaagaaaaggggggattggggggtacagtgcaggggaaagaatagtagacataatagcaacagacatacaaactaaag

SEQ ID NO: 20258 - DNA, 301 bp, Artificial Sequence
  Zfhx3.2_NTC.49
  crRNA array
  misc_feature (148)..(157): n is a, c, g, or t
cttggctttatatatcttgtggaaaggacgaaacaccgtaatttctactaagtgtagatacgtgcgacacaaaagcaactaatttctactaagtgtagattcggggcgcgtcaactgaattaatttctactaagtgtagatttttttnnnnnnnnnnaagcttggcgtggatccgatatcaactagatcttgagacaaatggcagtattcatccacaattttaaaagaaaaggggggattggggggtacagtgcaggggaaagaatagtagacataatagcaacagacatacaaactaaag

SEQ ID NO: 20259 - DNA, 301 bp, Artificial Sequence
  Zfhx3.2_NTC.5
  crRNA array
  misc_feature (148)..(157): n is a, c, g, or t
cttggctttatatatcttgtggaaaggacgaaacaccgtaatttctactaagtgtagatacgtgcgacacaaaagcaactaatttctactaagtgtagatgcttacgcgtcgcgaatgtataatttctactaagtgtagatttttttnnnnnnnnnnaagcttggcgtggatccgatatcaactagatcttgagacaaatggcagtattcatccacaattttaaaagaaaaggggggattggggggtacagtgcaggggaaagaatagtagacataatagcaacagacatacaaactaaag

SEQ ID NO: 20260 - DNA, 301 bp, Artificial Sequence
  Zfhx3.2_NTC.50
  crRNA array
  misc_feature (148)..(157): n is a, c, g, or t
cttggctttatatatcttgtggaaaggacgaaacaccgtaatttctactaagtgtagatacgtgcgacacaaaagcaactaatttctactaagtgtagatattgccgctcgcgcaaaatctaatttctactaagtgtagatttttttnnnnnnnnnnaagcttggcgtggatccgatatcaactagatcttgagacaaatggcagtattcatccacaattttaaaagaaaaggggggattggggggtacagtgcaggggaaagaatagtagacataatagcaacagacatacaaactaaag

SEQ ID NO: 20261 - DNA, 301 bp, Artificial Sequence
  Zfhx3.2_NTC.51
  crRNA array
  misc_feature (148)..(157): n is a, c, g, or t
cttggctttatatatcttgtggaaaggacgaaacaccgtaatttctactaagtgtagatacgtgcgacacaaaagcaactaatttctactaagtgtagattaacgcgcaacacgccaatgtaatttctactaagtgtagatttttttnnnnnnnnnnaagcttggcgtggatccgatatcaactagatcttgagacaaatggcagtattcatccacaattttaaaagaaaaggggggattggggggtacagtgcaggggaaagaatagtagacataatagcaacagacatacaaactaaag

SEQ ID NO: 20262 - DNA, 301 bp, Artificial Sequence
  Zfhx3.2_NTC.6
  crRNA array
  misc_feature (148)..(157): n is a, c, g, or t
cttggctttatatatcttgtggaaaggacgaaacaccgtaatttctactaagtgtagatacgtgcgacacaaaagcaactaatttctactaagtgtagatcgaatcgcgcctacgggaattaatttctactaagtgtagatttttttnnnnnnnnnnaagcttggcgtggatccgatatcaactagatcttgagacaaatggcagtattcatccacaattttaaaagaaaaggggggattggggggtacagtgcaggggaaagaatagtagacataatagcaacagacatacaaactaaag

SEQ ID NO: 20263 - DNA, 301 bp, Artificial Sequence
  Zfhx3.2_NTC.7
  crRNA array
  misc_feature (148)..(157): n is a, c, g, or t
cttggctttatatatcttgtggaaaggacgaaacaccgtaatttctactaagtgtagatacgtgcgacacaaaagcaactaatttctactaagtgtagatcgccgaacggataagactattaatttctactaagtgtagatttttttnnnnnnnnnnaagcttggcgtggatccgatatcaactagatcttgagacaaatggcagtattcatccacaattttaaaagaaaaggggggattggggggtacagtgcaggggaaagaatagtagacataatagcaacagacatacaaactaaag

SEQ ID NO: 20264 - DNA, 301 bp, Artificial Sequence
  Zfhx3.2_NTC.8
  crRNA array
  misc_feature (148)..(157): n is a, c, g, or t
cttggctttatatatcttgtggaaaggacgaaacaccgtaatttctactaagtgtagatacgtgcgacacaaaagcaactaatttctactaagtgtagatcgaccgaggttacgctgggataatttctactaagtgtagatttttttnnnnnnnnnnaagcttggcgtggatccgatatcaactagatcttgagacaaatggcagtattcatccacaattttaaaagaaaaggggggattggggggtacagtgcaggggaaagaatagtagacataatagcaacagacatacaaactaaag

SEQ ID NO: 20265 - DNA, 301 bp, Artificial Sequence
  Zfhx3.2_NTC.9
  crRNA array
  misc_feature (148)..(157): n is a, c, g, or t
cttggctttatatatcttgtggaaaggacgaaacaccgtaatttctactaagtgtagatacgtgcgacacaaaagcaactaatttctactaagtgtagatatcgccgtacggctatggcataatttctactaagtgtagatttttttnnnnnnnnnnaagcttggcgtggatccgatatcaactagatcttgagacaaatggcagtattcatccacaattttaaaagaaaaggggggattggggggtacagtgcaggggaaagaatagtagacataatagcaacagacatacaaactaaag

SEQ ID NO: 20266 - DNA, 301 bp, Artificial Sequence
  Zfhx3.3_NTC.0
  crRNA array
  misc_feature (148)..(157): n is a, c, g, or t
cttggctttatatatcttgtggaaaggacgaaacaccgtaatttctactaagtgtagattgctctacggcaagaggaaataatttctactaagtgtagattatagcgtcgcgcgctaatttaatttctactaagtgtagatttttttnnnnnnnnnnaagcttggcgtggatccgatatcaactagatcttgagacaaatggcagtattcatccacaattttaaaagaaaaggggggattggggggtacagtgcaggggaaagaatagtagacataatagcaacagacatacaaactaaag

SEQ ID NO: 20267 - DNA, 301 bp, Artificial Sequence
  Zfhx3.3_NTC.1
  crRNA array
  misc_feature (148)..(157): n is a, c, g, or t
cttggctttatatatcttgtggaaaggacgaaacaccgtaatttctactaagtgtagattgctctacggcaagaggaaataatttctactaagtgtagatcgcgtaaccgttccggctcctaatttctactaagtgtagatttttttnnnnnnnnnnaagcttggcgtggatccgatatcaactagatcttgagacaaatggcagtattcatccacaattttaaaagaaaaggggggattggggggtacagtgcaggggaaagaatagtagacataatagcaacagacatacaaactaaag

SEQ ID NO: 20268 - DNA, 301 bp, Artificial Sequence
  Zfhx3.3_NTC.10
  crRNA array
  misc_feature (148)..(157): n is a, c, g, or t
cttggctttatatatcttgtggaaaggacgaaacaccgtaatttctactaagtgtagattgctctacggcaagaggaaataatttctactaagtgtagatcgctaagttcgcgcgggccgtaatttctactaagtgtagatttttttnnnnnnnnnnaagcttggcgtggatccgatatcaactagatcttgagacaaatggcagtattcatccacaattttaaaagaaaaggggggattggggggtacagtgcaggggaaagaatagtagacataatagcaacagacatacaaactaaag

SEQ ID NO: 20269 - DNA, 301 bp, Artificial Sequence
  Zfhx3.3_NTC.11
  crRNA array
  misc_feature (148)..(157): n is a, c, g, or t
cttggctttatatatcttgtggaaaggacgaaacaccgtaatttctactaagtgtagattgctctacggcaagaggaaataatttctactaagtgtagatcgttcgtcgacgaagcaatctaatttctactaagtgtagatttttttnnnnnnnnnnaagcttggcgtggatccgatatcaactagatcttgagacaaatggcagtattcatccacaattttaaaagaaaaggggggattggggggtacagtgcaggggaaagaatagtagacataatagcaacagacatacaaactaaag

SEQ ID NO: 20270 - DNA, 301 bp, Artificial Sequence
  Zfhx3.3_NTC.12
  crRNA array
  misc_feature (148)..(157): n is a, c, g, or t
cttggctttatatatcttgtggaaaggacgaaacaccgtaatttctactaagtgtagattgctctacggcaagaggaaataatttctactaagtgtagatcgccgacgattaatcaatagtaatttctactaagtgtagatttttttnnnnnnnnnnaagcttggcgtggatccgatatcaactagatcttgagacaaatggcagtattcatccacaattttaaaagaaaaggggggattggggggtacagtgcaggggaaagaatagtagacataatagcaacagacatacaaactaaag

SEQ ID NO: 20271 - DNA, 301 bp, Artificial Sequence
  Zfhx3.3_NTC.13
  crRNA array
  misc_feature (148)..(157): n is a, c, g, or t
cttggctttatatatcttgtggaaaggacgaaacaccgtaatttctactaagtgtagattgctctacggcaagaggaaataatttctactaagtgtagatgaccgttgtatcgcgatcaataatttctactaagtgtagatttttttnnnnnnnnnnaagcttggcgtggatccgatatcaactagatcttgagacaaatggcagtattcatccacaattttaaaagaaaaggggggattggggggtacagtgcaggggaaagaatagtagacataatagcaacagacatacaaactaaag

SEQ ID NO: 20272 - DNA, 301 bp, Artificial Sequence
  Zfhx3.3_NTC.14
  crRNA array
  misc_feature (148)..(157): n is a, c, g, or t
cttggctttatatatcttgtggaaaggacgaaacaccgtaatttctactaagtgtagattgctctacggcaagaggaaataatttctactaagtgtagatccgttcgtgcgatagtgttttaatttctactaagtgtagatttttttnnnnnnnnnnaagcttggcgtggatccgatatcaactagatcttgagacaaatggcagtattcatccacaattttaaaagaaaaggggggattggggggtacagtgcaggggaaagaatagtagacataatagcaacagacatacaaactaaag

SEQ ID NO: 20273 - DNA, 301 bp, Artificial Sequence
  Zfhx3.3_NTC.15
  crRNA array
  misc_feature (148)..(157): n is a, c, g, or t
cttggctttatatatcttgtggaaaggacgaaacaccgtaatttctactaagtgtagattgctctacggcaagaggaaataatttctactaagtgtagatgttgtcgtgccgcgaatttataatttctactaagtgtagatttttttnnnnnnnnnnaagcttggcgtggatccgatatcaactagatcttgagacaaatggcagtattcatccacaattttaaaagaaaaggggggattggggggtacagtgcaggggaaagaatagtagacataatagcaacagacatacaaactaaag

SEQ ID NO: 20274 - DNA, 301 bp, Artificial Sequence
  Zfhx3.3_NTC.16
  crRNA array
  misc_feature (148)..(157): n is a, c, g, or t
cttggctttatatatcttgtggaaaggacgaaacaccgtaatttctactaagtgtagattgctctacggcaagaggaaataatttctactaagtgtagatcggtacgttagacgaaaatttaatttctactaagtgtagatttttttnnnnnnnnnnaagcttggcgtggatccgatatcaactagatcttgagacaaatggcagtattcatccacaattttaaaagaaaaggggggattggggggtacagtgcaggggaaagaatagtagacataatagcaacagacatacaaactaaag

SEQ ID NO: 20275 - DNA, 301 bp, Artificial Sequence
  Zfhx3.3_NTC.17
  crRNA array
  misc_feature (148)..(157): n is a, c, g, or t
cttggctttatatatcttgtggaaaggacgaaacaccgtaatttctactaagtgtagattgctctacggcaagaggaaataatttctactaagtgtagattatcgaacgctatcgaacgttaatttctactaagtgtagatttttttnnnnnnnnnnaagcttggcgtggatccgatatcaactagatcttgagacaaatggcagtattcatccacaattttaaaagaaaaggggggattggggggtacagtgcaggggaaagaatagtagacataatagcaacagacatacaaactaaag

SEQ ID NO: 20276 - DNA, 301 bp, Artificial Sequence
  Zfhx3.3_NTC.18
  crRNA array
  misc_feature (148)..(157): n is a, c, g, or t
cttggctttatatatcttgtggaaaggacgaaacaccgtaatttctactaagtgtagattgctctacggcaagaggaaataatttctactaagtgtagattccggttacgaccggcaaaataatttctactaagtgtagatttttttnnnnnnnnnnaagcttggcgtggatccgatatcaactagatcttgagacaaatggcagtattcatccacaattttaaaagaaaaggggggattggggggtacagtgcaggggaaagaatagtagacataatagcaacagacatacaaactaaag

SEQ ID NO: 20277 - DNA, 301 bp, Artificial Sequence
  Zfhx3.3_NTC.19
  crRNA array
  misc_feature (148)..(157): n is a, c, g, or t
cttggctttatatatcttgtggaaaggacgaaacaccgtaatttctactaagtgtagattgctctacggcaagaggaaataatttctactaagtgtagatcgtcgtagaacgatacccgataatttctactaagtgtagatttttttnnnnnnnnnnaagcttggcgtggatccgatatcaactagatcttgagacaaatggcagtattcatccacaattttaaaagaaaaggggggattggggggtacagtgcaggggaaagaatagtagacataatagcaacagacatacaaactaaag

SEQ ID NO: 20278 - DNA, 301 bp, Artificial Sequence
  Zfhx3.3_NTC.2
  crRNA array
  misc_feature (148)..(157): n is a, c, g, or t
cttggctttatatatcttgtggaaaggacgaaacaccgtaatttctactaagtgtagattgctctacggcaagaggaaataatttctactaagtgtagatttatgtcgcgccgcgacccgtaatttctactaagtgtagatttttttnnnnnnnnnnaagcttggcgtggatccgatatcaactagatcttgagacaaatggcagtattcatccacaattttaaaagaaaaggggggattggggggtacagtgcaggggaaagaatagtagacataatagcaacagacatacaaactaaag

SEQ ID NO: 20279 - DNA, 301 bp, Artificial Sequence
  Zfhx3.3_NTC.20
  crRNA array
  misc_feature (148)..(157): n is a, c, g, or t
cttggctttatatatcttgtggaaaggacgaaacaccgtaatttctactaagtgtagattgctctacggcaagaggaaataatttctactaagtgtagatattccggcgcgaccagaagataatttctactaagtgtagatttttttnnnnnnnnnnaagcttggcgtggatccgatatcaactagatcttgagacaaatggcagtattcatccacaattttaaaagaaaaggggggattggggggtacagtgcaggggaaagaatagtagacataatagcaacagacatacaaactaaag

SEQ ID NO: 20280 - DNA, 301 bp, Artificial Sequence
  Zfhx3.3_NTC.21
  crRNA array
  misc_feature (148)..(157): n is a, c, g, or t
cttggctttatatatcttgtggaaaggacgaaacaccgtaatttctactaagtgtagattgctctacggcaagaggaaataatttctactaagtgtagatgtataacttcgcgcggtccgtaatttctactaagtgtagatttttttnnnnnnnnnnaagcttggcgtggatccgatatcaactagatcttgagacaaatggcagtattcatccacaattttaaaagaaaaggggggattggggggtacagtgcaggggaaagaatagtagacataatagcaacagacatacaaactaaag

SEQ ID NO: 20281 - DNA, 301 bp, Artificial Sequence
  Zfhx3.3_NTC.22
  crRNA array
  misc_feature (148)..(157): n is a, c, g, or t
cttggctttatatatcttgtggaaaggacgaaacaccgtaatttctactaagtgtagattgctctacggcaagaggaaataatttctactaagtgtagatgcgcgtcaacgtaatgtgcctaatttctactaagtgtagatttttttnnnnnnnnnnaagcttggcgtggatccgatatcaactagatcttgagacaaatggcagtattcatccacaattttaaaagaaaaggggggattggggggtacagtgcaggggaaagaatagtagacataatagcaacagacatacaaactaaag

SEQ ID NO: 20282 - DNA, 301 bp, Artificial Sequence
  Zfhx3.3_NTC.23
  crRNA array
  misc_feature (148)..(157): n is a, c, g, or t
cttggctttatatatcttgtggaaaggacgaaacaccgtaatttctactaagtgtagattgctctacggcaagaggaaataatttctactaagtgtagatacgcgctattatcgtaggtgtaatttctactaagtgtagatttttttnnnnnnnnnnaagcttggcgtggatccgatatcaactagatcttgagacaaatggcagtattcatccacaattttaaaagaaaaggggggattggggggtacagtgcaggggaaagaatagtagacataatagcaacagacatacaaactaaag

SEQ ID NO: 20283 - DNA, 301 bp, Artificial Sequence
  Zfhx3.3_NTC.24
  crRNA array
  misc_feature (148)..(157): n is a, c, g, or t
cttggctttatatatcttgtggaaaggacgaaacaccgtaatttctactaagtgtagattgctctacggcaagaggaaataatttctactaagtgtagatactatcgacgttcgtcccggtaatttctactaagtgtagatttttttnnnnnnnnnnaagcttggcgtggatccgatatcaactagatcttgagacaaatggcagtattcatccacaattttaaaagaaaaggggggattggggggtacagtgcaggggaaagaatagtagacataatagcaacagacatacaaactaaag

SEQ ID NO: 20284 - DNA, 301 bp, Artificial Sequence
  Zfhx3.3_NTC.25
  crRNA array
  misc_feature (148)..(157): n is a, c, g, or t
cttggctttatatatcttgtggaaaggacgaaacaccgtaatttctactaagtgtagattgctctacggcaagaggaaataatttctactaagtgtagattcgcgttatcgtgccgtgcgtaatttctactaagtgtagatttttttnnnnnnnnnnaagcttggcgtggatccgatatcaactagatcttgagacaaatggcagtattcatccacaattttaaaagaaaaggggggattggggggtacagtgcaggggaaagaatagtagacataatagcaacagacatacaaactaaag

SEQ ID NO: 20285 - DNA, 301 bp, Artificial Sequence
  Zfhx3.3_NTC.26
  crRNA array
  misc_feature (148)..(157): n is a, c, g, or t
cttggctttatatatcttgtggaaaggacgaaacaccgtaatttctactaagtgtagattgctctacggcaagaggaaataatttctactaagtgtagatcgcgacggcggttttaacactaatttctactaagtgtagatttttttnnnnnnnnnnaagcttggcgtggatccgatatcaactagatcttgagacaaatggcagtattcatccacaattttaaaagaaaaggggggattggggggtacagtgcaggggaaagaatagtagacataatagcaacagacatacaaactaaag

SEQ ID NO: 20286 - DNA, 301 bp, Artificial Sequence
  Zfhx3.3_NTC.27
  crRNA array
  misc_feature (148)..(157): n is a, c, g, or t
cttggctttatatatcttgtggaaaggacgaaacaccgtaatttctactaagtgtagattgctctacggcaagaggaaataatttctactaagtgtagatgtcgcgttgcgaccggcgcttaatttctactaagtgtagatttttttnnnnnnnnnnaagcttggcgtggatccgatatcaactagatcttgagacaaatggcagtattcatccacaattttaaaagaaaaggggggattggggggtacagtgcaggggaaagaatagtagacataatagcaacagacatacaaactaaag

SEQ ID NO: 20287 - DNA, 301 bp, Artificial Sequence
  Zfhx3.3_NTC.28
  crRNA array
  misc_feature (148)..(157): n is a, c, g, or t
cttggctttatatatcttgtggaaaggacgaaacaccgtaatttctactaagtgtagattgctctacggcaagaggaaataatttctactaagtgtagataccgctaatcggcgtaaacttaatttctactaagtgtagatttttttnnnnnnnnnnaagcttggcgtggatccgatatcaactagatcttgagacaaatggcagtattcatccacaattttaaaagaaaaggggggattggggggtacagtgcaggggaaagaatagtagacataatagcaacagacatacaaactaaag

SEQ ID NO: 20288 - DNA, 301 bp, Artificial Sequence
  Zfhx3.3_NTC.29
  crRNA array
  misc_feature (148)..(157): n is a, c, g, or t
cttggctttatatatcttgtggaaaggacgaaacaccgtaatttctactaagtgtagattgctctacggcaagaggaaataatttctactaagtgtagatcgcgatctataccgtctatataatttctactaagtgtagatttttttnnnnnnnnnnaagcttggcgtggatccgatatcaactagatcttgagacaaatggcagtattcatccacaattttaaaagaaaaggggggattggggggtacagtgcaggggaaagaatagtagacataatagcaacagacatacaaactaaag

SEQ ID NO: 20289 - DNA, 301 bp, Artificial Sequence
  Zfhx3.3_NTC.3
  crRNA array
  misc_feature (148)..(157): n is a, c, g, or t
cttggctttatatatcttgtggaaaggacgaaacaccgtaatttctactaagtgtagattgctctacggcaagaggaaataatttctactaagtgtagattcgacgcgagacgacgtacataatttctactaagtgtagatttttttnnnnnnnnnnaagcttggcgtggatccgatatcaactagatcttgagacaaatggcagtattcatccacaattttaaaagaaaaggggggattggggggtacagtgcaggggaaagaatagtagacataatagcaacagacatacaaactaaag

SEQ ID NO: 20290 - DNA, 301 bp, Artificial Sequence
  Zfhx3.3_NTC.30
  crRNA array
  misc_feature (148)..(157): n is a, c, g, or t
cttggctttatatatcttgtggaaaggacgaaacaccgtaatttctactaagtgtagattgctctacggcaagaggaaataatttctactaagtgtagatcgatcgtacgggtgtcctaataatttctactaagtgtagatttttttnnnnnnnnnnaagcttggcgtggatccgatatcaactagatcttgagacaaatggcagtattcatccacaattttaaaagaaaaggggggattggggggtacagtgcaggggaaagaatagtagacataatagcaacagacatacaaactaaag

SEQ ID NO: 20291 - DNA, 301 bp, Artificial Sequence
  Zfhx3.3_NTC.31
  crRNA array
  misc_feature (148)..(157): n is a, c, g, or t
cttggctttatatatcttgtggaaaggacgaaacaccgtaatttctactaagtgtagattgctctacggcaagaggaaataatttctactaagtgtagatgccgaccgcgtgattgtaggtaatttctactaagtgtagatttttttnnnnnnnnnnaagcttggcgtggatccgatatcaactagatcttgagacaaatggcagtattcatccacaattttaaaagaaaaggggggattggggggtacagtgcaggggaaagaatagtagacataatagcaacagacatacaaactaaag

SEQ ID NO: 20292 - DNA, 301 bp, Artificial Sequence
  Zfhx3.3_NTC.32
  crRNA array
  misc_feature (148)..(157): n is a, c, g, or t
cttggctttatatatcttgtggaaaggacgaaacaccgtaatttctactaagtgtagattgctctacggcaagaggaaataatttctactaagtgtagatgcacgttacgcccgggtcactaatttctactaagtgtagatttttttnnnnnnnnnnaagcttggcgtggatccgatatcaactagatcttgagacaaatggcagtattcatccacaattttaaaagaaaaggggggattggggggtacagtgcaggggaaagaatagtagacataatagcaacagacatacaaactaaag

SEQ ID NO: 20293 - DNA, 301 bp, Artificial Sequence
  Zfhx3.3_NTC.33
  crRNA array
  misc_feature (148)..(157): n is a, c, g, or t
cttggctttatatatcttgtggaaaggacgaaacaccgtaatttctactaagtgtagattgctctacggcaagaggaaataatttctactaagtgtagattaagcgaccgacgcattcgctaatttctactaagtgtagatttttttnnnnnnnnnnaagcttggcgtggatccgatatcaactagatcttgagacaaatggcagtattcatccacaattttaaaagaaaaggggggattggggggtacagtgcaggggaaagaatagtagacataatagcaacagacatacaaactaaag

SEQ ID NO: 20294 - DNA, 301 bp, Artificial Sequence
  Zfhx3.3_NTC.34
  crRNA array
  misc_feature (148)..(157): n is a, c, g, or t
cttggctttatatatcttgtggaaaggacgaaacaccgtaatttctactaagtgtagattgctctacggcaagaggaaataatttctactaagtgtagattagcgttcgacacgtgaaactaatttctactaagtgtagatttttttnnnnnnnnnnaagcttggcgtggatccgatatcaactagatcttgagacaaatggcagtattcatccacaattttaaaagaaaaggggggattggggggtacagtgcaggggaaagaatagtagacataatagcaacagacatacaaactaaag

SEQ ID NO: 20295 - DNA, 301 bp, Artificial Sequence
  Zfhx3.3_NTC.35
  crRNA array
  misc_feature (148)..(157): n is a, c, g, or t
cttggctttatatatcttgtggaaaggacgaaacaccgtaatttctactaagtgtagattgctctacggcaagaggaaataatttctactaagtgtagattggcgcgtaatcgctattcgtaatttctactaagtgtagatttttttnnnnnnnnnnaagcttggcgtggatccgatatcaactagatcttgagacaaatggcagtattcatccacaattttaaaagaaaaggggggattggggggtacagtgcaggggaaagaatagtagacataatagcaacagacatacaaactaaag

SEQ ID NO: 20296 - DNA, 301 bp, Artificial Sequence
  Zfhx3.3_NTC.36
  crRNA array
  misc_feature (148)..(157): n is a, c, g, or t
cttggctttatatatcttgtggaaaggacgaaacaccgtaatttctactaagtgtagattgctctacggcaagaggaaataatttctactaagtgtagatcaacccgccgtagcgggccttaatttctactaagtgtagatttttttnnnnnnnnnnaagcttggcgtggatccgatatcaactagatcttgagacaaatggcagtattcatccacaattttaaaagaaaaggggggattggggggtacagtgcaggggaaagaatagtagacataatagcaacagacatacaaactaaag

SEQ ID NO: 20297 - DNA, 301 bp, Artificial Sequence
  Zfhx3.3_NTC.37
  crRNA array
  misc_feature (148)..(157): n is a, c, g, or t
cttggctttatatatcttgtggaaaggacgaaacaccgtaatttctactaagtgtagattgctctacggcaagaggaaataatttctactaagtgtagattttgcgttgacgcgattacttaatttctactaagtgtagatttttttnnnnnnnnnnaagcttggcgtggatccgatatcaactagatcttgagacaaatggcagtattcatccacaattttaaaagaaaaggggggattggggggtacagtgcaggggaaagaatagtagacataatagcaacagacatacaaactaaag

SEQ ID NO: 20298 - DNA, 301 bp, Artificial Sequence
  Zfhx3.3_NTC.38
  crRNA array
  misc_feature (148)..(157): n is a, c, g, or t
cttggctttatatatcttgtggaaaggacgaaacaccgtaatttctactaagtgtagattgctctacggcaagaggaaataatttctactaagtgtagataacggagcgcgatactaccataatttctactaagtgtagatttttttnnnnnnnnnnaagcttggcgtggatccgatatcaactagatcttgagacaaatggcagtattcatccacaattttaaaagaaaaggggggattggggggtacagtgcaggggaaagaatagtagacataatagcaacagacatacaaactaaag

SEQ ID NO: 20299 - DNA, 301 bp, Artificial Sequence
  Zfhx3.3_NTC.39
  crRNA array
  misc_feature (148)..(157): n is a, c, g, or t
cttggctttatatatcttgtggaaaggacgaaacaccgtaatttctactaagtgtagattgctctacggcaagaggaaataatttctactaagtgtagatccggacgttataacgtttcttaatttctactaagtgtagatttttttnnnnnnnnnnaagcttggcgtggatccgatatcaactagatcttgagacaaatggcagtattcatccacaattttaaaagaaaaggggggattggggggtacagtgcaggggaaagaatagtagacataatagcaacagacatacaaactaaag

SEQ ID NO: 20300 - DNA, 301 bp, Artificial Sequence
  Zfhx3.3_NTC.4
  crRNA array
  misc_feature (148)..(157): n is a, c, g, or t
cttggctttatatatcttgtggaaaggacgaaacaccgtaatttctactaagtgtagattgctctacggcaagaggaaataatttctactaagtgtagatatacccgtcgcgaacgtgagtaatttctactaagtgtagatttttttnnnnnnnnnnaagcttggcgtggatccgatatcaactagatcttgagacaaatggcagtattcatccacaattttaaaagaaaaggggggattggggggtacagtgcaggggaaagaatagtagacataatagcaacagacatacaaactaaag

SEQ ID NO: 20301 - DNA, 301 bp, Artificial Sequence
  Zfhx3.3_NTC.40
  crRNA array
  misc_feature (148)..(157): n is a, c, g, or t
cttggctttatatatcttgtggaaaggacgaaacaccgtaatttctactaagtgtagattgctctacggcaagaggaaataatttctactaagtgtagatattcgcgaacccggccggaataatttctactaagtgtagatttttttnnnnnnnnnnaagcttggcgtggatccgatatcaactagatcttgagacaaatggcagtattcatccacaattttaaaagaaaaggggggattggggggtacagtgcaggggaaagaatagtagacataatagcaacagacatacaaactaaag

SEQ ID NO: 20302 - DNA, 301 bp, Artificial Sequence
  Zfhx3.3_NTC.41
  crRNA array
  misc_feature (148)..(157): n is a, c, g, or t
cttggctttatatatcttgtggaaaggacgaaacaccgtaatttctactaagtgtagattgctctacggcaagaggaaataatttctactaagtgtagatttgatggcgcgacgcgttattaatttctactaagtgtagatttttttnnnnnnnnnnaagcttggcgtggatccgatatcaactagatcttgagacaaatggcagtattcatccacaattttaaaagaaaaggggggattggggggtacagtgcaggggaaagaatagtagacataatagcaacagacatacaaactaaag

SEQ ID NO: 20303 - DNA, 301 bp, Artificial Sequence
  Zfhx3.3_NTC.42
  crRNA array
  misc_feature (148)..(157): n is a, c, g, or t
cttggctttatatatcttgtggaaaggacgaaacaccgtaatttctactaagtgtagattgctctacggcaagaggaaataatttctactaagtgtagatggtcaaatcgcggcgataactaatttctactaagtgtagatttttttnnnnnnnnnnaagcttggcgtggatccgatatcaactagatcttgagacaaatggcagtattcatccacaattttaaaagaaaaggggggattggggggtacagtgcaggggaaagaatagtagacataatagcaacagacatacaaactaaag

SEQ ID NO: 20304 - DNA, 301 bp, Artificial Sequence
  Zfhx3.3_NTC.43
  crRNA array
  misc_feature (148)..(157): n is a, c, g, or t
cttggctttatatatcttgtggaaaggacgaaacaccgtaatttctactaagtgtagattgctctacggcaagaggaaataatttctactaagtgtagatcgactcgcgcattgaactggtaatttctactaagtgtagatttttttnnnnnnnnnnaagcttggcgtggatccgatatcaactagatcttgagacaaatggcagtattcatccacaattttaaaagaaaaggggggattggggggtacagtgcaggggaaagaatagtagacataatagcaacagacatacaaactaaag

SEQ ID NO: 20305 - DNA, 301 bp, Artificial Sequence
  Zfhx3.3_NTC.44
  crRNA array
  misc_feature (148)..(157): n is a, c, g, or t
cttggctttatatatcttgtggaaaggacgaaacaccgtaatttctactaagtgtagattgctctacggcaagaggaaataatttctactaagtgtagatagcgtcgtacgatttatcgttaatttctactaagtgtagatttttttnnnnnnnnnnaagcttggcgtggatccgatatcaactagatcttgagacaaatggcagtattcatccacaattttaaaagaaaaggggggattggggggtacagtgcaggggaaagaatagtagacataatagcaacagacatacaaactaaag

SEQ ID NO: 20306 - DNA, 301 bp, Artificial Sequence
  Zfhx3.3_NTC.45
  crRNA array
  misc_feature (148)..(157): n is a, c, g, or t
cttggctttatatatcttgtggaaaggacgaaacaccgtaatttctactaagtgtagattgctctacggcaagaggaaataatttctactaagtgtagatcggaacgcgtgatactagggtaatttctactaagtgtagatttttttnnnnnnnnnnaagcttggcgtggatccgatatcaactagatcttgagacaaatggcagtattcatccacaattttaaaagaaaaggggggattggggggtacagtgcaggggaaagaatagtagacataatagcaacagacatacaaactaaag

SEQ ID NO: 20307 - DNA, 301 bp, Artificial Sequence
  Zfhx3.3_NTC.46
  crRNA array
  misc_feature (148)..(157): n is a, c, g, or t
cttggctttatatatcttgtggaaaggacgaaacaccgtaatttctactaagtgtagattgctctacggcaagaggaaataatttctactaagtgtagatagcgggtcgtagacgcgcggtaatttctactaagtgtagatttttttnnnnnnnnnnaagcttggcgtggatccgatatcaactagatcttgagacaaatggcagtattcatccacaattttaaaagaaaaggggggattggggggtacagtgcaggggaaagaatagtagacataatagcaacagacatacaaactaaag

SEQ ID NO: 20308 - DNA, 301 bp, Artificial Sequence
  Zfhx3.3_NTC.47
  crRNA array
  misc_feature (148)..(157): n is a, c, g, or t
cttggctttatatatcttgtggaaaggacgaaacaccgtaatttctactaagtgtagattgctctacggcaagaggaaataatttctactaagtgtagattctcgtatcgcgattgttaataatttctactaagtgtagatttttttnnnnnnnnnnaagcttggcgtggatccgatatcaactagatcttgagacaaatggcagtattcatccacaattttaaaagaaaaggggggattggggggtacagtgcaggggaaagaatagtagacataatagcaacagacatacaaactaaag

SEQ ID NO: 20309 - DNA, 301 bp, Artificial Sequence
  Zfhx3.3_NTC.48
  crRNA array
  misc_feature (148)..(157): n is a, c, g, or t
cttggctttatatatcttgtggaaaggacgaaacaccgtaatttctactaagtgtagattgctctacggcaagaggaaataatttctactaagtgtagatcggtcgactacggctgttagtaatttctactaagtgtagatttttttnnnnnnnnnnaagcttggcgtggatccgatatcaactagatcttgagacaaatggcagtattcatccacaattttaaaagaaaaggggggattggggggtacagtgcaggggaaagaatagtagacataatagcaacagacatacaaactaaag

SEQ ID NO: 20310 - DNA, 301 bp, Artificial Sequence
  Zfhx3.3_NTC.49
  crRNA array
  misc_feature (148)..(157): n is a, c, g, or t
cttggctttatatatcttgtggaaaggacgaaacaccgtaatttctactaagtgtagattgctctacggcaagaggaaataatttctactaagtgtagattcggggcgcgtcaactgaattaatttctactaagtgtagatttttttnnnnnnnnnnaagcttggcgtggatccgatatcaactagatcttgagacaaatggcagtattcatccacaattttaaaagaaaaggggggattggggggtacagtgcaggggaaagaatagtagacataatagcaacagacatacaaactaaag

SEQ ID NO: 20311 - DNA, 301 bp, Artificial Sequence
  Zfhx3.3_NTC.5
  crRNA array
  misc_feature (148)..(157): n is a, c, g, or t
cttggctttatatatcttgtggaaaggacgaaacaccgtaatttctactaagtgtagattgctctacggcaagaggaaataatttctactaagtgtagatgcttacgcgtcgcgaatgtataatttctactaagtgtagatttttttnnnnnnnnnnaagcttggcgtggatccgatatcaactagatcttgagacaaatggcagtattcatccacaattttaaaagaaaaggggggattggggggtacagtgcaggggaaagaatagtagacataatagcaacagacatacaaactaaag

SEQ ID NO: 20312 - DNA, 301 bp, Artificial Sequence
  Zfhx3.3_NTC.50
  crRNA array
  misc_feature (148)..(157): n is a, c, g, or t
cttggctttatatatcttgtggaaaggacgaaacaccgtaatttctactaagtgtagattgctctacggcaagaggaaataatttctactaagtgtagatattgccgctcgcgcaaaatctaatttctactaagtgtagatttttttnnnnnnnnnnaagcttggcgtggatccgatatcaactagatcttgagacaaatggcagtattcatccacaattttaaaagaaaaggggggattggggggtacagtgcaggggaaagaatagtagacataatagcaacagacatacaaactaaag

SEQ ID NO: 20313 - DNA, 301 bp, Artificial Sequence
  Zfhx3.3_NTC.51
  crRNA array
  misc_feature (148)..(157): n is a, c, g, or t
cttggctttatatatcttgtggaaaggacgaaacaccgtaatttctactaagtgtagattgctctacggcaagaggaaataatttctactaagtgtagattaacgcgcaacacgccaatgtaatttctactaagtgtagatttttttnnnnnnnnnnaagcttggcgtggatccgatatcaactagatcttgagacaaatggcagtattcatccacaattttaaaagaaaaggggggattggggggtacagtgcaggggaaagaatagtagacataatagcaacagacatacaaactaaag

SEQ ID NO: 20314 - DNA, 301 bp, Artificial Sequence
  Zfhx3.3_NTC.6
  crRNA array
  misc_feature (148)..(157): n is a, c, g, or t
cttggctttatatatcttgtggaaaggacgaaacaccgtaatttctactaagtgtagattgctctacggcaagaggaaataatttctactaagtgtagatcgaatcgcgcctacgggaattaatttctactaagtgtagatttttttnnnnnnnnnnaagcttggcgtggatccgatatcaactagatcttgagacaaatggcagtattcatccacaattttaaaagaaaaggggggattggggggtacagtgcaggggaaagaatagtagacataatagcaacagacatacaaactaaag

SEQ ID NO: 20315 - DNA, 301 bp, Artificial Sequence
  Zfhx3.3_NTC.7
  crRNA array
  misc_feature (148)..(157): n is a, c, g, or t
cttggctttatatatcttgtggaaaggacgaaacaccgtaatttctactaagtgtagattgctctacggcaagaggaaataatttctactaagtgtagatcgccgaacggataagactattaatttctactaagtgtagatttttttnnnnnnnnnnaagcttggcgtggatccgatatcaactagatcttgagacaaatggcagtattcatccacaattttaaaagaaaaggggggattggggggtacagtgcaggggaaagaatagtagacataatagcaacagacatacaaactaaag

SEQ ID NO: 20316 - DNA, 301 bp, Artificial Sequence
  Zfhx3.3_NTC.8
  crRNA array
  misc_feature (148)..(157): n is a, c, g, or t
cttggctttatatatcttgtggaaaggacgaaacaccgtaatttctactaagtgtagattgctctacggcaagaggaaataatttctactaagtgtagatcgaccgaggttacgctgggataatttctactaagtgtagatttttttnnnnnnnnnnaagcttggcgtggatccgatatcaactagatcttgagacaaatggcagtattcatccacaattttaaaagaaaaggggggattggggggtacagtgcaggggaaagaatagtagacataatagcaacagacatacaaactaaag

SEQ ID NO: 20317 - DNA, 301 bp, Artificial Sequence
  Zfhx3.3_NTC.9
  crRNA array
  misc_feature (148)..(157): n is a, c, g, or t
cttggctttatatatcttgtggaaaggacgaaacaccgtaatttctactaagtgtagattgctctacggcaagaggaaataatttctactaagtgtagatatcgccgtacggctatggcataatttctactaagtgtagatttttttnnnnnnnnnnaagcttggcgtggatccgatatcaactagatcttgagacaaatggcagtattcatccacaattttaaaagaaaaggggggattggggggtacagtgcaggggaaagaatagtagacataatagcaacagacatacaaactaaag

SEQ ID NO: 20318 - DNA, 301 bp, Artificial Sequence
  Zfhx3.4_NTC.0
  crRNA array
  misc_feature (148)..(157): n is a, c, g, or t
cttggctttatatatcttgtggaaaggacgaaacaccgtaatttctactaagtgtagatagtgagcggcagactgcgagtaatttctactaagtgtagattatagcgtcgcgcgctaatttaatttctactaagtgtagatttttttnnnnnnnnnnaagcttggcgtggatccgatatcaactagatcttgagacaaatggcagtattcatccacaattttaaaagaaaaggggggattggggggtacagtgcaggggaaagaatagtagacataatagcaacagacatacaaactaaag

SEQ ID NO: 20319 - DNA, 301 bp, Artificial Sequence
  Zfhx3.4_NTC.1
  crRNA array
  misc_feature (148)..(157): n is a, c, g, or t
cttggctttatatatcttgtggaaaggacgaaacaccgtaatttctactaagtgtagatagtgagcggcagactgcgagtaatttctactaagtgtagatcgcgtaaccgttccggctcctaatttctactaagtgtagatttttttnnnnnnnnnnaagcttggcgtggatccgatatcaactagatcttgagacaaatggcagtattcatccacaattttaaaagaaaaggggggattggggggtacagtgcaggggaaagaatagtagacataatagcaacagacatacaaactaaag

SEQ ID NO: 20320 - DNA, 301 bp, Artificial Sequence
  Zfhx3.4_NTC.10
  crRNA array
  misc_feature (148)..(157): n is a, c, g, or t
cttggctttatatatcttgtggaaaggacgaaacaccgtaatttctactaagtgtagatagtgagcggcagactgcgagtaatttctactaagtgtagatcgctaagttcgcgcgggccgtaatttctactaagtgtagatttttttnnnnnnnnnnaagcttggcgtggatccgatatcaactagatcttgagacaaatggcagtattcatccacaattttaaaagaaaaggggggattggggggtacagtgcaggggaaagaatagtagacataatagcaacagacatacaaactaaag

SEQ ID NO: 20321 - DNA, 301 bp, Artificial Sequence
  Zfhx3.4_NTC.11
  crRNA array
  misc_feature (148)..(157): n is a, c, g, or t
cttggctttatatatcttgtggaaaggacgaaacaccgtaatttctactaagtgtagatagtgagcggcagactgcgagtaatttctactaagtgtagatcgttcgtcgacgaagcaatctaatttctactaagtgtagatttttttnnnnnnnnnnaagcttggcgtggatccgatatcaactagatcttgagacaaatggcagtattcatccacaattttaaaagaaaaggggggattggggggtacagtgcaggggaaagaatagtagacataatagcaacagacatacaaactaaag

SEQ ID NO: 20322 - DNA, 301 bp, Artificial Sequence
  Zfhx3.4_NTC.12
  crRNA array
  misc_feature (148)..(157): n is a, c, g, or t
cttggctttatatatcttgtggaaaggacgaaacaccgtaatttctactaagtgtagatagtgagcggcagactgcgagtaatttctactaagtgtagatcgccgacgattaatcaatagtaatttctactaagtgtagatttttttnnnnnnnnnnaagcttggcgtggatccgatatcaactagatcttgagacaaatggcagtattcatccacaattttaaaagaaaaggggggattggggggtacagtgcaggggaaagaatagtagacataatagcaacagacatacaaactaaag

SEQ ID NO: 20323 - DNA, 301 bp, Artificial Sequence
  Zfhx3.4_NTC.13
  crRNA array
  misc_feature (148)..(157): n is a, c, g, or t
cttggctttatatatcttgtggaaaggacgaaacaccgtaatttctactaagtgtagatagtgagcggcagactgcgagtaatttctactaagtgtagatgaccgttgtatcgcgatcaataatttctactaagtgtagatttttttnnnnnnnnnnaagcttggcgtggatccgatatcaactagatcttgagacaaatggcagtattcatccacaattttaaaagaaaaggggggattggggggtacagtgcaggggaaagaatagtagacataatagcaacagacatacaaactaaag

SEQ ID NO: 20324 - DNA, 301 bp, Artificial Sequence
  Zfhx3.4_NTC.14
  crRNA array
  misc_feature (148)..(157): n is a, c, g, or t
cttggctttatatatcttgtggaaaggacgaaacaccgtaatttctactaagtgtagatagtgagcggcagactgcgagtaatttctactaagtgtagatccgttcgtgcgatagtgttttaatttctactaagtgtagatttttttnnnnnnnnnnaagcttggcgtggatccgatatcaactagatcttgagacaaatggcagtattcatccacaattttaaaagaaaaggggggattggggggtacagtgcaggggaaagaatagtagacataatagcaacagacatacaaactaaag

SEQ ID NO: 20325 - DNA, 301 bp, Artificial Sequence
  Zfhx3.4_NTC.15
  crRNA array
  misc_feature (148)..(157): n is a, c, g, or t
cttggctttatatatcttgtggaaaggacgaaacaccgtaatttctactaagtgtagatagtgagcggcagactgcgagtaatttctactaagtgtagatgttgtcgtgccgcgaatttataatttctactaagtgtagatttttttnnnnnnnnnnaagcttggcgtggatccgatatcaactagatcttgagacaaatggcagtattcatccacaattttaaaagaaaaggggggattggggggtacagtgcaggggaaagaatagtagacataatagcaacagacatacaaactaaag

SEQ ID NO: 20326 - DNA, 301 bp, Artificial Sequence
  Zfhx3.4_NTC.16
  crRNA array
  misc_feature (148)..(157): n is a, c, g, or t
cttggctttatatatcttgtggaaaggacgaaacaccgtaatttctactaagtgtagatagtgagcggcagactgcgagtaatttctactaagtgtagatcggtacgttagacgaaaatttaatttctactaagtgtagatttttttnnnnnnnnnnaagcttggcgtggatccgatatcaactagatcttgagacaaatggcagtattcatccacaattttaaaagaaaaggggggattggggggtacagtgcaggggaaagaatagtagacataatagcaacagacatacaaactaaag

SEQ ID NO: 20327 - DNA, 301 bp, Artificial Sequence
  Zfhx3.4_NTC.17
  crRNA array
  misc_feature (148)..(157): n is a, c, g, or t
cttggctttatatatcttgtggaaaggacgaaacaccgtaatttctactaagtgtagatagtgagcggcagactgcgagtaatttctactaagtgtagattatcgaacgctatcgaacgttaatttctactaagtgtagatttttttnnnnnnnnnnaagcttggcgtggatccgatatcaactagatcttgagacaaatggcagtattcatccacaattttaaaagaaaaggggggattggggggtacagtgcaggggaaagaatagtagacataatagcaacagacatacaaactaaag

SEQ ID NO: 20328 - DNA, 301 bp, Artificial Sequence
  Zfhx3.4_NTC.18
  crRNA array
  misc_feature (148)..(157): n is a, c, g, or t
cttggctttatatatcttgtggaaaggacgaaacaccgtaatttctactaagtgtagatagtgagcggcagactgcgagtaatttctactaagtgtagattccggttacgaccggcaaaataatttctactaagtgtagatttttttnnnnnnnnnnaagcttggcgtggatccgatatcaactagatcttgagacaaatggcagtattcatccacaattttaaaagaaaaggggggattggggggtacagtgcaggggaaagaatagtagacataatagcaacagacatacaaactaaag

SEQ ID NO: 20329 - DNA, 301 bp, Artificial Sequence
  Zfhx3.4_NTC.19
  crRNA array
  misc_feature (148)..(157): n is a, c, g, or t
cttggctttatatatcttgtggaaaggacgaaacaccgtaatttctactaagtgtagatagtgagcggcagactgcgagtaatttctactaagtgtagatcgtcgtagaacgatacccgataatttctactaagtgtagatttttttnnnnnnnnnnaagcttggcgtggatccgatatcaactagatcttgagacaaatggcagtattcatccacaattttaaaagaaaaggggggattggggggtacagtgcaggggaaagaatagtagacataatagcaacagacatacaaactaaag

SEQ ID NO: 20330 - DNA, 301 bp, Artificial Sequence
  Zfhx3.4_NTC.2
  crRNA array
  misc_feature (148)..(157): n is a, c, g, or t
cttggctttatatatcttgtggaaaggacgaaacaccgtaatttctactaagtgtagatagtgagcggcagactgcgagtaatttctactaagtgtagatttatgtcgcgccgcgacccgtaatttctactaagtgtagatttttttnnnnnnnnnnaagcttggcgtggatccgatatcaactagatcttgagacaaatggcagtattcatccacaattttaaaagaaaaggggggattggggggtacagtgcaggggaaagaatagtagacataatagcaacagacatacaaactaaag

SEQ ID NO: 20331 - DNA, 301 bp, Artificial Sequence
  Zfhx3.4_NTC.20
  crRNA array
  misc_feature (148)..(157): n is a, c, g, or t
cttggctttatatatcttgtggaaaggacgaaacaccgtaatttctactaagtgtagatagtgagcggcagactgcgagtaatttctactaagtgtagatattccggcgcgaccagaagataatttctactaagtgtagatttttttnnnnnnnnnnaagcttggcgtggatccgatatcaactagatcttgagacaaatggcagtattcatccacaattttaaaagaaaaggggggattggggggtacagtgcaggggaaagaatagtagacataatagcaacagacatacaaactaaag

SEQ ID NO: 20332 - DNA, 301 bp, Artificial Sequence
  Zfhx3.4_NTC.21
  crRNA array
  misc_feature (148)..(157): n is a, c, g, or t
cttggctttatatatcttgtggaaaggacgaaacaccgtaatttctactaagtgtagatagtgagcggcagactgcgagtaatttctactaagtgtagatgtataacttcgcgcggtccgtaatttctactaagtgtagatttttttnnnnnnnnnnaagcttggcgtggatccgatatcaactagatcttgagacaaatggcagtattcatccacaattttaaaagaaaaggggggattggggggtacagtgcaggggaaagaatagtagacataatagcaacagacatacaaactaaag

SEQ ID NO: 20333 - DNA, 301 bp, Artificial Sequence
  Zfhx3.4_NTC.22
  crRNA array
  misc_feature (148)..(157): n is a, c, g, or t
cttggctttatatatcttgtggaaaggacgaaacaccgtaatttctactaagtgtagatagtgagcggcagactgcgagtaatttctactaagtgtagatgcgcgtcaacgtaatgtgcctaatttctactaagtgtagatttttttnnnnnnnnnnaagcttggcgtggatccgatatcaactagatcttgagacaaatggcagtattcatccacaattttaaaagaaaaggggggattggggggtacagtgcaggggaaagaatagtagacataatagcaacagacatacaaactaaag

SEQ ID NO: 20334 - DNA, 301 bp, Artificial Sequence
  Zfhx3.4_NTC.23
  crRNA array
  misc_feature (148)..(157): n is a, c, g, or t
cttggctttatatatcttgtggaaaggacgaaacaccgtaatttctactaagtgtagatagtgagcggcagactgcgagtaatttctactaagtgtagatacgcgctattatcgtaggtgtaatttctactaagtgtagatttttttnnnnnnnnnnaagcttggcgtggatccgatatcaactagatcttgagacaaatggcagtattcatccacaattttaaaagaaaaggggggattggggggtacagtgcaggggaaagaatagtagacataatagcaacagacatacaaactaaag

SEQ ID NO: 20335 - DNA, 301 bp, Artificial Sequence
  Zfhx3.4_NTC.24
  crRNA array
  misc_feature (148)..(157): n is a, c, g, or t
cttggctttatatatcttgtggaaaggacgaaacaccgtaatttctactaagtgtagatagtgagcggcagactgcgagtaatttctactaagtgtagatactatcgacgttcgtcccggtaatttctactaagtgtagatttttttnnnnnnnnnnaagcttggcgtggatccgatatcaactagatcttgagacaaatggcagtattcatccacaattttaaaagaaaaggggggattggggggtacagtgcaggggaaagaatagtagacataatagcaacagacatacaaactaaag

SEQ ID NO: 20336 - DNA, 301 bp, Artificial Sequence
  Zfhx3.4_NTC.25
  crRNA array
  misc_feature (148)..(157): n is a, c, g, or t
cttggctttatatatcttgtggaaaggacgaaacaccgtaatttctactaagtgtagatagtgagcggcagactgcgagtaatttctactaagtgtagattcgcgttatcgtgccgtgcgtaatttctactaagtgtagatttttttnnnnnnnnnnaagcttggcgtggatccgatatcaactagatcttgagacaaatggcagtattcatccacaattttaaaagaaaaggggggattggggggtacagtgcaggggaaagaatagtagacataatagcaacagacatacaaactaaag

SEQ ID NO: 20337 - DNA, 301 bp, Artificial Sequence
  Zfhx3.4_NTC.26
  crRNA array
  misc_feature (148)..(157): n is a, c, g, or t
cttggctttatatatcttgtggaaaggacgaaacaccgtaatttctactaagtgtagatagtgagcggcagactgcgagtaatttctactaagtgtagatcgcgacggcggttttaacactaatttctactaagtgtagatttttttnnnnnnnnnnaagcttggcgtggatccgatatcaactagatcttgagacaaatggcagtattcatccacaattttaaaagaaaaggggggattggggggtacagtgcaggggaaagaatagtagacataatagcaacagacatacaaactaaag

SEQ ID NO: 20338 - DNA, 301 bp, Artificial Sequence
  Zfhx3.4_NTC.27
  crRNA array
  misc_feature (148)..(157): n is a, c, g, or t
cttggctttatatatcttgtggaaaggacgaaacaccgtaatttctactaagtgtagatagtgagcggcagactgcgagtaatttctactaagtgtagatgtcgcgttgcgaccggcgcttaatttctactaagtgtagatttttttnnnnnnnnnnaagcttggcgtggatccgatatcaactagatcttgagacaaatggcagtattcatccacaattttaaaagaaaaggggggattggggggtacagtgcaggggaaagaatagtagacataatagcaacagacatacaaactaaag

SEQ ID NO: 20339 - DNA, 301 bp, Artificial Sequence
  Zfhx3.4_NTC.28
  crRNA array
  misc_feature (148)..(157): n is a, c, g, or t
cttggctttatatatcttgtggaaaggacgaaacaccgtaatttctactaagtgtagatagtgagcggcagactgcgagtaatttctactaagtgtagataccgctaatcggcgtaaacttaatttctactaagtgtagatttttttnnnnnnnnnnaagcttggcgtggatccgatatcaactagatcttgagacaaatggcagtattcatccacaattttaaaagaaaaggggggattggggggtacagtgcaggggaaagaatagtagacataatagcaacagacatacaaactaaag

SEQ ID NO: 20340 - DNA, 301 bp, Artificial Sequence
  Zfhx3.4_NTC.29
  crRNA array
  misc_feature (148)..(157): n is a, c, g, or t
cttggctttatatatcttgtggaaaggacgaaacaccgtaatttctactaagtgtagatagtgagcggcagactgcgagtaatttctactaagtgtagatcgcgatctataccgtctatataatttctactaagtgtagatttttttnnnnnnnnnnaagcttggcgtggatccgatatcaactagatcttgagacaaatggcagtattcatccacaattttaaaagaaaaggggggattggggggtacagtgcaggggaaagaatagtagacataatagcaacagacatacaaactaaag

SEQ ID NO: 20341 - DNA, 301 bp, Artificial Sequence
  Zfhx3.4_NTC.3
  crRNA array
  misc_feature (148)..(157): n is a, c, g, or t
cttggctttatatatcttgtggaaaggacgaaacaccgtaatttctactaagtgtagatagtgagcggcagactgcgagtaatttctactaagtgtagattcgacgcgagacgacgtacataatttctactaagtgtagatttttttnnnnnnnnnnaagcttggcgtggatccgatatcaactagatcttgagacaaatggcagtattcatccacaattttaaaagaaaaggggggattggggggtacagtgcaggggaaagaatagtagacataatagcaacagacatacaaactaaag

SEQ ID NO: 20342 - DNA, 301 bp, Artificial Sequence
  Zfhx3.4_NTC.30
  crRNA array
  misc_feature (148)..(157): n is a, c, g, or t
cttggctttatatatcttgtggaaaggacgaaacaccgtaatttctactaagtgtagatagtgagcggcagactgcgagtaatttctactaagtgtagatcgatcgtacgggtgtcctaataatttctactaagtgtagatttttttnnnnnnnnnnaagcttggcgtggatccgatatcaactagatcttgagacaaatggcagtattcatccacaattttaaaagaaaaggggggattggggggtacagtgcaggggaaagaatagtagacataatagcaacagacatacaaactaaag

SEQ ID NO: 20343 - DNA, 301 bp, Artificial Sequence
  Zfhx3.4_NTC.31
  crRNA array
  misc_feature (148)..(157): n is a, c, g, or t
cttggctttatatatcttgtggaaaggacgaaacaccgtaatttctactaagtgtagatagtgagcggcagactgcgagtaatttctactaagtgtagatgccgaccgcgtgattgtaggtaatttctactaagtgtagatttttttnnnnnnnnnnaagcttggcgtggatccgatatcaactagatcttgagacaaatggcagtattcatccacaattttaaaagaaaaggggggattggggggtacagtgcaggggaaagaatagtagacataatagcaacagacatacaaactaaag

SEQ ID NO: 20344 - DNA, 301 bp, Artificial Sequence
  Zfhx3.4_NTC.32
  crRNA array
  misc_feature (148)..(157): n is a, c, g, or t
cttggctttatatatcttgtggaaaggacgaaacaccgtaatttctactaagtgtagatagtgagcggcagactgcgagtaatttctactaagtgtagatgcacgttacgcccgggtcactaatttctactaagtgtagatttttttnnnnnnnnnnaagcttggcgtggatccgatatcaactagatcttgagacaaatggcagtattcatccacaattttaaaagaaaaggggggattggggggtacagtgcaggggaaagaatagtagacataatagcaacagacatacaaactaaag

SEQ ID NO: 20345 - DNA, 301 bp, Artificial Sequence
  Zfhx3.4_NTC.33
  crRNA array
  misc_feature (148)..(157): n is a, c, g, or t
cttggctttatatatcttgtggaaaggacgaaacaccgtaatttctactaagtgtagatagtgagcggcagactgcgagtaatttctactaagtgtagattaagcgaccgacgcattcgctaatttctactaagtgtagatttttttnnnnnnnnnnaagcttggcgtggatccgatatcaactagatcttgagacaaatggcagtattcatccacaattttaaaagaaaaggggggattggggggtacagtgcaggggaaagaatagtagacataatagcaacagacatacaaactaaag

SEQ ID NO: 20346 - DNA, 301 bp, Artificial Sequence
  Zfhx3.4_NTC.34
  crRNA array
  misc_feature (148)..(157): n is a, c, g, or t
cttggctttatatatcttgtggaaaggacgaaacaccgtaatttctactaagtgtagatagtgagcggcagactgcgagtaatttctactaagtgtagattagcgttcgacacgtgaaactaatttctactaagtgtagatttttttnnnnnnnnnnaagcttggcgtggatccgatatcaactagatcttgagacaaatggcagtattcatccacaattttaaaagaaaaggggggattggggggtacagtgcaggggaaagaatagtagacataatagcaacagacatacaaactaaag

SEQ ID NO: 20347 - DNA, 301 bp, Artificial Sequence
  Zfhx3.4_NTC.35
  crRNA array
  misc_feature (148)..(157): n is a, c, g, or t
cttggctttatatatcttgtggaaaggacgaaacaccgtaatttctactaagtgtagatagtgagcggcagactgcgagtaatttctactaagtgtagattggcgcgtaatcgctattcgtaatttctactaagtgtagatttttttnnnnnnnnnnaagcttggcgtggatccgatatcaactagatcttgagacaaatggcagtattcatccacaattttaaaagaaaaggggggattggggggtacagtgcaggggaaagaatagtagacataatagcaacagacatacaaactaaag

SEQ ID NO: 20348 - DNA, 301 bp, Artificial Sequence
  Zfhx3.4_NTC.36
  crRNA array
  misc_feature (148)..(157): n is a, c, g, or t
cttggctttatatatcttgtggaaaggacgaaacaccgtaatttctactaagtgtagatagtgagcggcagactgcgagtaatttctactaagtgtagatcaacccgccgtagcgggccttaatttctactaagtgtagatttttttnnnnnnnnnnaagcttggcgtggatccgatatcaactagatcttgagacaaatggcagtattcatccacaattttaaaagaaaaggggggattggggggtacagtgcaggggaaagaatagtagacataatagcaacagacatacaaactaaag

SEQ ID NO: 20349 - DNA, 301 bp, Artificial Sequence
  Zfhx3.4_NTC.37
  crRNA array
  misc_feature (148)..(157): n is a, c, g, or t
cttggctttatatatcttgtggaaaggacgaaacaccgtaatttctactaagtgtagatagtgagcggcagactgcgagtaatttctactaagtgtagattttgcgttgacgcgattacttaatttctactaagtgtagatttttttnnnnnnnnnnaagcttggcgtggatccgatatcaactagatcttgagacaaatggcagtattcatccacaattttaaaagaaaaggggggattggggggtacagtgcaggggaaagaatagtagacataatagcaacagacatacaaactaaag

SEQ ID NO: 20350 - DNA, 301 bp, Artificial Sequence
  Zfhx3.4_NTC.38
  crRNA array
  misc_feature (148)..(157): n is a, c, g, or t
cttggctttatatatcttgtggaaaggacgaaacaccgtaatttctactaagtgtagatagtgagcggcagactgcgagtaatttctactaagtgtagataacggagcgcgatactaccataatttctactaagtgtagatttttttnnnnnnnnnnaagcttggcgtggatccgatatcaactagatcttgagacaaatggcagtattcatccacaattttaaaagaaaaggggggattggggggtacagtgcaggggaaagaatagtagacataatagcaacagacatacaaactaaag

SEQ ID NO: 20351 - DNA, 301 bp, Artificial Sequence
  Zfhx3.4_NTC.39
  crRNA array
  misc_feature (148)..(157): n is a, c, g, or t
cttggctttatatatcttgtggaaaggacgaaacaccgtaatttctactaagtgtagatagtgagcggcagactgcgagtaatttctactaagtgtagatccggacgttataacgtttcttaatttctactaagtgtagatttttttnnnnnnnnnnaagcttggcgtggatccgatatcaactagatcttgagacaaatggcagtattcatccacaattttaaaagaaaaggggggattggggggtacagtgcaggggaaagaatagtagacataatagcaacagacatacaaactaaag

SEQ ID NO: 20352 - DNA, 301 bp, Artificial Sequence
  Zfhx3.4_NTC.4
  crRNA array
  misc_feature (148)..(157): n is a, c, g, or t
cttggctttatatatcttgtggaaaggacgaaacaccgtaatttctactaagtgtagatagtgagcggcagactgcgagtaatttctactaagtgtagatatacccgtcgcgaacgtgagtaatttctactaagtgtagatttttttnnnnnnnnnnaagcttggcgtggatccgatatcaactagatcttgagacaaatggcagtattcatccacaattttaaaagaaaaggggggattggggggtacagtgcaggggaaagaatagtagacataatagcaacagacatacaaactaaag

SEQ ID NO: 20353 - DNA, 301 bp, Artificial Sequence
  Zfhx3.4_NTC.40
  crRNA array
  misc_feature (148)..(157): n is a, c, g, or t
cttggctttatatatcttgtggaaaggacgaaacaccgtaatttctactaagtgtagatagtgagcggcagactgcgagtaatttctactaagtgtagatattcgcgaacccggccggaataatttctactaagtgtagatttttttnnnnnnnnnnaagcttggcgtggatccgatatcaactagatcttgagacaaatggcagtattcatccacaattttaaaagaaaaggggggattggggggtacagtgcaggggaaagaatagtagacataatagcaacagacatacaaactaaag

SEQ ID NO: 20354 - DNA, 301 bp, Artificial Sequence
  Zfhx3.4_NTC.41
  crRNA array
  misc_feature (148)..(157): n is a, c, g, or t
cttggctttatatatcttgtggaaaggacgaaacaccgtaatttctactaagtgtagatagtgagcggcagactgcgagtaatttctactaagtgtagatttgatggcgcgacgcgttattaatttctactaagtgtagatttttttnnnnnnnnnnaagcttggcgtggatccgatatcaactagatcttgagacaaatggcagtattcatccacaattttaaaagaaaaggggggattggggggtacagtgcaggggaaagaatagtagacataatagcaacagacatacaaactaaag

SEQ ID NO: 20355 - DNA, 301 bp, Artificial Sequence
  Zfhx3.4_NTC.42
  crRNA array
  misc_feature (148)..(157): n is a, c, g, or t
cttggctttatatatcttgtggaaaggacgaaacaccgtaatttctactaagtgtagatagtgagcggcagactgcgagtaatttctactaagtgtagatggtcaaatcgcggcgataactaatttctactaagtgtagatttttttnnnnnnnnnnaagcttggcgtggatccgatatcaactagatcttgagacaaatggcagtattcatccacaattttaaaagaaaaggggggattggggggtacagtgcaggggaaagaatagtagacataatagcaacagacatacaaactaaag

SEQ ID NO: 20356 - DNA, 301 bp, Artificial Sequence
  Zfhx3.4_NTC.43
  crRNA array
  misc_feature (148)..(157): n is a, c, g, or t
cttggctttatatatcttgtggaaaggacgaaacaccgtaatttctactaagtgtagatagtgagcggcagactgcgagtaatttctactaagtgtagatcgactcgcgcattgaactggtaatttctactaagtgtagatttttttnnnnnnnnnnaagcttggcgtggatccgatatcaactagatcttgagacaaatggcagtattcatccacaattttaaaagaaaaggggggattggggggtacagtgcaggggaaagaatagtagacataatagcaacagacatacaaactaaag

SEQ ID NO: 20357 - DNA, 301 bp, Artificial Sequence
  Zfhx3.4_NTC.44
  crRNA array
  misc_feature (148)..(157): n is a, c, g, or t
cttggctttatatatcttgtggaaaggacgaaacaccgtaatttctactaagtgtagatagtgagcggcagactgcgagtaatttctactaagtgtagatagcgtcgtacgatttatcgttaatttctactaagtgtagatttttttnnnnnnnnnnaagcttggcgtggatccgatatcaactagatcttgagacaaatggcagtattcatccacaattttaaaagaaaaggggggattggggggtacagtgcaggggaaagaatagtagacataatagcaacagacatacaaactaaag

SEQ ID NO: 20358 - DNA, 301 bp, Artificial Sequence
  Zfhx3.4_NTC.45
  crRNA array
  misc_feature (148)..(157): n is a, c, g, or t
cttggctttatatatcttgtggaaaggacgaaacaccgtaatttctactaagtgtagatagtgagcggcagactgcgagtaatttctactaagtgtagatcggaacgcgtgatactagggtaatttctactaagtgtagatttttttnnnnnnnnnnaagcttggcgtggatccgatatcaactagatcttgagacaaatggcagtattcatccacaattttaaaagaaaaggggggattggggggtacagtgcaggggaaagaatagtagacataatagcaacagacatacaaactaaag

SEQ ID NO: 20359 - DNA, 301 bp, Artificial Sequence
  Zfhx3.4_NTC.46
  crRNA array
  misc_feature (148)..(157): n is a, c, g, or t
cttggctttatatatcttgtggaaaggacgaaacaccgtaatttctactaagtgtagatagtgagcggcagactgcgagtaatttctactaagtgtagatagcgggtcgtagacgcgcggtaatttctactaagtgtagatttttttnnnnnnnnnnaagcttggcgtggatccgatatcaactagatcttgagacaaatggcagtattcatccacaattttaaaagaaaaggggggattggggggtacagtgcaggggaaagaatagtagacataatagcaacagacatacaaactaaag

SEQ ID NO: 20360 - DNA, 301 bp, Artificial Sequence
  Zfhx3.4_NTC.47
  crRNA array
  misc_feature (148)..(157): n is a, c, g, or t
cttggctttatatatcttgtggaaaggacgaaacaccgtaatttctactaagtgtagatagtgagcggcagactgcgagtaatttctactaagtgtagattctcgtatcgcgattgttaataatttctactaagtgtagatttttttnnnnnnnnnnaagcttggcgtggatccgatatcaactagatcttgagacaaatggcagtattcatccacaattttaaaagaaaaggggggattggggggtacagtgcaggggaaagaatagtagacataatagcaacagacatacaaactaaag

SEQ ID NO: 20361 - DNA, 301 bp, Artificial Sequence
  Zfhx3.4_NTC.48
  crRNA array
  misc_feature (148)..(157): n is a, c, g, or t
cttggctttatatatcttgtggaaaggacgaaacaccgtaatttctactaagtgtagatagtgagcggcagactgcgagtaatttctactaagtgtagatcggtcgactacggctgttagtaatttctactaagtgtagatttttttnnnnnnnnnnaagcttggcgtggatccgatatcaactagatcttgagacaaatggcagtattcatccacaattttaaaagaaaaggggggattggggggtacagtgcaggggaaagaatagtagacataatagcaacagacatacaaactaaag

SEQ ID NO: 20362 - DNA, 301 bp, Artificial Sequence
  Zfhx3.4_NTC.49
  crRNA array
  misc_feature (148)..(157): n is a, c, g, or t
cttggctttatatatcttgtggaaaggacgaaacaccgtaatttctactaagtgtagatagtgagcggcagactgcgagtaatttctactaagtgtagattcggggcgcgtcaactgaattaatttctactaagtgtagatttttttnnnnnnnnnnaagcttggcgtggatccgatatcaactagatcttgagacaaatggcagtattcatccacaattttaaaagaaaaggggggattggggggtacagtgcaggggaaagaatagtagacataatagcaacagacatacaaactaaag

SEQ ID NO: 20363 - DNA, 301 bp, Artificial Sequence
  Zfhx3.4_NTC.5
  crRNA array
  misc_feature (148)..(157): n is a, c, g, or t
cttggctttatatatcttgtggaaaggacgaaacaccgtaatttctactaagtgtagatagtgagcggcagactgcgagtaatttctactaagtgtagatgcttacgcgtcgcgaatgtataatttctactaagtgtagatttttttnnnnnnnnnnaagcttggcgtggatccgatatcaactagatcttgagacaaatggcagtattcatccacaattttaaaagaaaaggggggattggggggtacagtgcaggggaaagaatagtagacataatagcaacagacatacaaactaaag

SEQ ID NO: 20364 - DNA, 301 bp, Artificial Sequence
  Zfhx3.4_NTC.50
  crRNA array
  misc_feature (148)..(157): n is a, c, g, or t
cttggctttatatatcttgtggaaaggacgaaacaccgtaatttctactaagtgtagatagtgagcggcagactgcgagtaatttctactaagtgtagatattgccgctcgcgcaaaatctaatttctactaagtgtagatttttttnnnnnnnnnnaagcttggcgtggatccgatatcaactagatcttgagacaaatggcagtattcatccacaattttaaaagaaaaggggggattggggggtacagtgcaggggaaagaatagtagacataatagcaacagacatacaaactaaag

SEQ ID NO: 20365 - DNA, 301 bp, Artificial Sequence
  Zfhx3.4_NTC.51
  crRNA array
  misc_feature (148)..(157): n is a, c, g, or t
cttggctttatatatcttgtggaaaggacgaaacaccgtaatttctactaagtgtagatagtgagcggcagactgcgagtaatttctactaagtgtagattaacgcgcaacacgccaatgtaatttctactaagtgtagatttttttnnnnnnnnnnaagcttggcgtggatccgatatcaactagatcttgagacaaatggcagtattcatccacaattttaaaagaaaaggggggattggggggtacagtgcaggggaaagaatagtagacataatagcaacagacatacaaactaaag

SEQ ID NO: 20366 - DNA, 301 bp, Artificial Sequence
  Zfhx3.4_NTC.6
  crRNA array
  misc_feature (148)..(157): n is a, c, g, or t
cttggctttatatatcttgtggaaaggacgaaacaccgtaatttctactaagtgtagatagtgagcggcagactgcgagtaatttctactaagtgtagatcgaatcgcgcctacgggaattaatttctactaagtgtagatttttttnnnnnnnnnnaagcttggcgtggatccgatatcaactagatcttgagacaaatggcagtattcatccacaattttaaaagaaaaggggggattggggggtacagtgcaggggaaagaatagtagacataatagcaacagacatacaaactaaag

SEQ ID NO: 20367 - DNA, 301 bp, Artificial Sequence
  Zfhx3.4_NTC.7
  crRNA array
  misc_feature (148)..(157): n is a, c, g, or t
cttggctttatatatcttgtggaaaggacgaaacaccgtaatttctactaagtgtagatagtgagcggcagactgcgagtaatttctactaagtgtagatcgccgaacggataagactattaatttctactaagtgtagatttttttnnnnnnnnnnaagcttggcgtggatccgatatcaactagatcttgagacaaatggcagtattcatccacaattttaaaagaaaaggggggattggggggtacagtgcaggggaaagaatagtagacataatagcaacagacatacaaactaaag

SEQ ID NO: 20368 - DNA, 301 bp, Artificial Sequence
  Zfhx3.4_NTC.8
  crRNA array
  misc_feature (148)..(157): n is a, c, g, or t
cttggctttatatatcttgtggaaaggacgaaacaccgtaatttctactaagtgtagatagtgagcggcagactgcgagtaatttctactaagtgtagatcgaccgaggttacgctgggataatttctactaagtgtagatttttttnnnnnnnnnnaagcttggcgtggatccgatatcaactagatcttgagacaaatggcagtattcatccacaattttaaaagaaaaggggggattggggggtacagtgcaggggaaagaatagtagacataatagcaacagacatacaaactaaag

SEQ ID NO: 20369 - DNA, 301 bp, Artificial Sequence
  Zfhx3.4_NTC.9
  crRNA array
  misc_feature (148)..(157): n is a, c, g, or t
cttggctttatatatcttgtggaaaggacgaaacaccgtaatttctactaagtgtagatagtgagcggcagactgcgagtaatttctactaagtgtagatatcgccgtacggctatggcataatttctactaagtgtagatttttttnnnnnnnnnnaagcttggcgtggatccgatatcaactagatcttgagacaaatggcagtattcatccacaattttaaaagaaaaggggggattggggggtacagtgcaggggaaagaatagtagacataatagcaacagacatacaaactaaag

SEQ ID NO: 20370 - DNA, 301 bp, Artificial Sequence
  NTC.13_NTC.2
  crRNA array
  misc_feature (148)..(157): n is a, c, g, or t
cttggctttatatatcttgtggaaaggacgaaacaccgtaatttctactaagtgtagatgaccgttgtatcgcgatcaataatttctactaagtgtagatttatgtcgcgccgcgacccgtaatttctactaagtgtagatttttttnnnnnnnnnnaagcttggcgtggatccgatatcaactagatcttgagacaaatggcagtattcatccacaattttaaaagaaaaggggggattggggggtacagtgcaggggaaagaatagtagacataatagcaacagacatacaaactaaag

SEQ ID NO: 20371 - DNA, 301 bp, Artificial Sequence
  NTC.13_NTC.0
  crRNA array
  misc_feature (148)..(157): n is a, c, g, or t
cttggctttatatatcttgtggaaaggacgaaacaccgtaatttctactaagtgtagatgaccgttgtatcgcgatcaataatttctactaagtgtagattatagcgtcgcgcgctaatttaatttctactaagtgtagatttttttnnnnnnnnnnaagcttggcgtggatccgatatcaactagatcttgagacaaatggcagtattcatccacaattttaaaagaaaaggggggattggggggtacagtgcaggggaaagaatagtagacataatagcaacagacatacaaactaaag

SEQ ID NO: 20372 - DNA, 301 bp, Artificial Sequence
  NTC.13_NTC.21
  crRNA array
  misc_feature (148)..(157): n is a, c, g, or t
cttggctttatatatcttgtggaaaggacgaaacaccgtaatttctactaagtgtagatgaccgttgtatcgcgatcaataatttctactaagtgtagatgtataacttcgcgcggtccgtaatttctactaagtgtagatttttttnnnnnnnnnnaagcttggcgtggatccgatatcaactagatcttgagacaaatggcagtattcatccacaattttaaaagaaaaggggggattggggggtacagtgcaggggaaagaatagtagacataatagcaacagacatacaaactaaag

SEQ ID NO: 20373 - DNA, 301 bp, Artificial Sequence
  NTC.13_NTC.43
  crRNA array
  misc_feature (148)..(157): n is a, c, g, or t
cttggctttatatatcttgtggaaaggacgaaacaccgtaatttctactaagtgtagatgaccgttgtatcgcgatcaataatttctactaagtgtagatcgactcgcgcattgaactggtaatttctactaagtgtagatttttttnnnnnnnnnnaagcttggcgtggatccgatatcaactagatcttgagacaaatggcagtattcatccacaattttaaaagaaaaggggggattggggggtacagtgcaggggaaagaatagtagacataatagcaacagacatacaaactaaag

SEQ ID NO: 20374 - DNA, 301 bp, Artificial Sequence
  NTC.13_NTC.44
  crRNA array
  misc_feature (148)..(157): n is a, c, g, or t
cttggctttatatatcttgtggaaaggacgaaacaccgtaatttctactaagtgtagatgaccgttgtatcgcgatcaataatttctactaagtgtagatagcgtcgtacgatttatcgttaatttctactaagtgtagatttttttnnnnnnnnnnaagcttggcgtggatccgatatcaactagatcttgagacaaatggcagtattcatccacaattttaaaagaaaaggggggattggggggtacagtgcaggggaaagaatagtagacataatagcaacagacatacaaactaaag

SEQ ID NO: 20375 - DNA, 301 bp, Artificial Sequence
  NTC.13_NTC.37
  crRNA array
  misc_feature (148)..(157): n is a, c, g, or t
cttggctttatatatcttgtggaaaggacgaaacaccgtaatttctactaagtgtagatgaccgttgtatcgcgatcaataatttctactaagtgtagattttgcgttgacgcgattacttaatttctactaagtgtagatttttttnnnnnnnnnnaagcttggcgtggatccgatatcaactagatcttgagacaaatggcagtattcatccacaattttaaaagaaaaggggggattggggggtacagtgcaggggaaagaatagtagacataatagcaacagacatacaaactaaag

SEQ ID NO: 20376 - DNA, 301 bp, Artificial Sequence
  NTC.13_NTC.7
  crRNA array
  misc_feature (148)..(157): n is a, c, g, or t
cttggctttatatatcttgtggaaaggacgaaacaccgtaatttctactaagtgtagatgaccgttgtatcgcgatcaataatttctactaagtgtagatcgccgaacggataagactattaatttctactaagtgtagatttttttnnnnnnnnnnaagcttggcgtggatccgatatcaactagatcttgagacaaatggcagtattcatccacaattttaaaagaaaaggggggattggggggtacagtgcaggggaaagaatagtagacataatagcaacagacatacaaactaaag

SEQ ID NO: 20377 - DNA, 301 bp, Artificial Sequence
  NTC.13_NTC.49
  crRNA array
  misc_feature (148)..(157): n is a, c, g, or t
cttggctttatatatcttgtggaaaggacgaaacaccgtaatttctactaagtgtagatgaccgttgtatcgcgatcaataatttctactaagtgtagattcggggcgcgtcaactgaattaatttctactaagtgtagatttttttnnnnnnnnnnaagcttggcgtggatccgatatcaactagatcttgagacaaatggcagtattcatccacaattttaaaagaaaaggggggattggggggtacagtgcaggggaaagaatagtagacataatagcaacagacatacaaactaaag

SEQ ID NO: 20378 - DNA, 301 bp, Artificial Sequence
  NTC.13_NTC.50
  crRNA array
  misc_feature (148)..(157): n is a, c, g, or t
cttggctttatatatcttgtggaaaggacgaaacaccgtaatttctactaagtgtagatgaccgttgtatcgcgatcaataatttctactaagtgtagatattgccgctcgcgcaaaatctaatttctactaagtgtagatttttttnnnnnnnnnnaagcttggcgtggatccgatatcaactagatcttgagacaaatggcagtattcatccacaattttaaaagaaaaggggggattggggggtacagtgcaggggaaagaatagtagacataatagcaacagacatacaaactaaag

SEQ ID NO: 20379 - DNA, 301 bp, Artificial Sequence
  NTC.13_NTC.39
  crRNA array
  misc_feature (148)..(157): n is a, c, g, or t
cttggctttatatatcttgtggaaaggacgaaacaccgtaatttctactaagtgtagatgaccgttgtatcgcgatcaataatttctactaagtgtagatccggacgttataacgtttcttaatttctactaagtgtagatttttttnnnnnnnnnnaagcttggcgtggatccgatatcaactagatcttgagacaaatggcagtattcatccacaattttaaaagaaaaggggggattggggggtacagtgcaggggaaagaatagtagacataatagcaacagacatacaaactaaag

SEQ ID NO: 20380 - DNA, 301 bp, Artificial Sequence
  NTC.13_NTC.29
  crRNA array
  misc_feature (148)..(157): n is a, c, g, or t
cttggctttatatatcttgtggaaaggacgaaacaccgtaatttctactaagtgtagatgaccgttgtatcgcgatcaataatttctactaagtgtagatcgcgatctataccgtctatataatttctactaagtgtagatttttttnnnnnnnnnnaagcttggcgtggatccgatatcaactagatcttgagacaaatggcagtattcatccacaattttaaaagaaaaggggggattggggggtacagtgcaggggaaagaatagtagacataatagcaacagacatacaaactaaag

SEQ ID NO: 20381 - DNA, 301 bp, Artificial Sequence
  NTC.13_NTC.25
  crRNA array
  misc_feature (148)..(157): n is a, c, g, or t
cttggctttatatatcttgtggaaaggacgaaacaccgtaatttctactaagtgtagatgaccgttgtatcgcgatcaataatttctactaagtgtagattcgcgttatcgtgccgtgcgtaatttctactaagtgtagatttttttnnnnnnnnnnaagcttggcgtggatccgatatcaactagatcttgagacaaatggcagtattcatccacaattttaaaagaaaaggggggattggggggtacagtgcaggggaaagaatagtagacataatagcaacagacatacaaactaaag

SEQ ID NO: 20382 - DNA, 301 bp, Artificial Sequence
  NTC.13_NTC.3
  crRNA array
  misc_feature (148)..(157): n is a, c, g, or t
cttggctttatatatcttgtggaaaggacgaaacaccgtaatttctactaagtgtagatgaccgttgtatcgcgatcaataatttctactaagtgtagattcgacgcgagacgacgtacataatttctactaagtgtagatttttttnnnnnnnnnnaagcttggcgtggatccgatatcaactagatcttgagacaaatggcagtattcatccacaattttaaaagaaaaggggggattggggggtacagtgcaggggaaagaatagtagacataatagcaacagacatacaaactaaag

SEQ ID NO: 20383 - DNA, 301 bp, Artificial Sequence
  NTC.13_NTC.47
  crRNA array
  misc_feature (148)..(157): n is a, c, g, or t
cttggctttatatatcttgtggaaaggacgaaacaccgtaatttctactaagtgtagatgaccgttgtatcgcgatcaataatttctactaagtgtagattctcgtatcgcgattgttaataatttctactaagtgtagatttttttnnnnnnnnnnaagcttggcgtggatccgatatcaactagatcttgagacaaatggcagtattcatccacaattttaaaagaaaaggggggattggggggtacagtgcaggggaaagaatagtagacataatagcaacagacatacaaactaaag

SEQ ID NO: 20384 - DNA, 301 bp, Artificial Sequence
  NTC.13_NTC.32
  crRNA array
  misc_feature (148)..(157): n is a, c, g, or t
cttggctttatatatcttgtggaaaggacgaaacaccgtaatttctactaagtgtagatgaccgttgtatcgcgatcaataatttctactaagtgtagatgcacgttacgcccgggtcactaatttctactaagtgtagatttttttnnnnnnnnnnaagcttggcgtggatccgatatcaactagatcttgagacaaatggcagtattcatccacaattttaaaagaaaaggggggattggggggtacagtgcaggggaaagaatagtagacataatagcaacagacatacaaactaaag

SEQ ID NO: 20385 - DNA, 301 bp, Artificial Sequence
  NTC.13_NTC.40
  crRNA array
  misc_feature (148)..(157): n is a, c, g, or t
cttggctttatatatcttgtggaaaggacgaaacaccgtaatttctactaagtgtagatgaccgttgtatcgcgatcaataatttctactaagtgtagatattcgcgaacccggccggaataatttctactaagtgtagatttttttnnnnnnnnnnaagcttggcgtggatccgatatcaactagatcttgagacaaatggcagtattcatccacaattttaaaagaaaaggggggattggggggtacagtgcaggggaaagaatagtagacataatagcaacagacatacaaactaaag

SEQ ID NO: 20386 - DNA, 301 bp, Artificial Sequence
  NTC.13_NTC.5
  crRNA array
  misc_feature (148)..(157): n is a, c, g, or t
cttggctttatatatcttgtggaaaggacgaaacaccgtaatttctactaagtgtagatgaccgttgtatcgcgatcaataatttctactaagtgtagatgcttacgcgtcgcgaatgtataatttctactaagtgtagatttttttnnnnnnnnnnaagcttggcgtggatccgatatcaactagatcttgagacaaatggcagtattcatccacaattttaaaagaaaaggggggattggggggtacagtgcaggggaaagaatagtagacataatagcaacagacatacaaactaaag

SEQ ID NO: 20387 - DNA, 301 bp, Artificial Sequence
  NTC.13_NTC.33
  crRNA array
  misc_feature (148)..(157): n is a, c, g, or t
cttggctttatatatcttgtggaaaggacgaaacaccgtaatttctactaagtgtagatgaccgttgtatcgcgatcaataatttctactaagtgtagattaagcgaccgacgcattcgctaatttctactaagtgtagatttttttnnnnnnnnnnaagcttggcgtggatccgatatcaactagatcttgagacaaatggcagtattcatccacaattttaaaagaaaaggggggattggggggtacagtgcaggggaaagaatagtagacataatagcaacagacatacaaactaaag

SEQ ID NO: 20388 - DNA, 301 bp, Artificial Sequence
  NTC.13_NTC.1
  crRNA array
  misc_feature (148)..(157): n is a, c, g, or t
cttggctttatatatcttgtggaaaggacgaaacaccgtaatttctactaagtgtagatgaccgttgtatcgcgatcaataatttctactaagtgtagatcgcgtaaccgttccggctcctaatttctactaagtgtagatttttttnnnnnnnnnnaagcttggcgtggatccgatatcaactagatcttgagacaaatggcagtattcatccacaattttaaaagaaaaggggggattggggggtacagtgcaggggaaagaatagtagacataatagcaacagacatacaaactaaag

SEQ ID NO: 20389 - DNA, 301 bp, Artificial Sequence
  NTC.13_NTC.6
  crRNA array
  misc_feature (148)..(157): n is a, c, g, or t
cttggctttatatatcttgtggaaaggacgaaacaccgtaatttctactaagtgtagatgaccgttgtatcgcgatcaataatttctactaagtgtagatcgaatcgcgcctacgggaattaatttctactaagtgtagatttttttnnnnnnnnnnaagcttggcgtggatccgatatcaactagatcttgagacaaatggcagtattcatccacaattttaaaagaaaaggggggattggggggtacagtgcaggggaaagaatagtagacataatagcaacagacatacaaactaaag

SEQ ID NO: 20390 - DNA, 301 bp, Artificial Sequence
  NTC.13_NTC.38
  crRNA array
  misc_feature (148)..(157): n is a, c, g, or t
cttggctttatatatcttgtggaaaggacgaaacaccgtaatttctactaagtgtagatgaccgttgtatcgcgatcaataatttctactaagtgtagataacggagcgcgatactaccataatttctactaagtgtagatttttttnnnnnnnnnnaagcttggcgtggatccgatatcaactagatcttgagacaaatggcagtattcatccacaattttaaaagaaaaggggggattggggggtacagtgcaggggaaagaatagtagacataatagcaacagacatacaaactaaag

SEQ ID NO: 20391 - DNA, 301 bp, Artificial Sequence
  NTC.13_NTC.41
  crRNA array
  misc_feature (148)..(157): n is a, c, g, or t
cttggctttatatatcttgtggaaaggacgaaacaccgtaatttctactaagtgtagatgaccgttgtatcgcgatcaataatttctactaagtgtagatttgatggcgcgacgcgttattaatttctactaagtgtagatttttttnnnnnnnnnnaagcttggcgtggatccgatatcaactagatcttgagacaaatggcagtattcatccacaattttaaaagaaaaggggggattggggggtacagtgcaggggaaagaatagtagacataatagcaacagacatacaaactaaag

SEQ ID NO: 20392 - DNA, 301 bp, Artificial Sequence
  NTC.13_NTC.18
  crRNA array
  misc_feature (148)..(157): n is a, c, g, or t
cttggctttatatatcttgtggaaaggacgaaacaccgtaatttctactaagtgtagatgaccgttgtatcgcgatcaataatttctactaagtgtagattccggttacgaccggcaaaataatttctactaagtgtagatttttttnnnnnnnnnnaagcttggcgtggatccgatatcaactagatcttgagacaaatggcagtattcatccacaattttaaaagaaaaggggggattggggggtacagtgcaggggaaagaatagtagacataatagcaacagacatacaaactaaag

SEQ ID NO: 20393 - DNA, 301 bp, Artificial Sequence
  NTC.13_NTC.24
  crRNA array
  misc_feature (148)..(157): n is a, c, g, or t
cttggctttatatatcttgtggaaaggacgaaacaccgtaatttctactaagtgtagatgaccgttgtatcgcgatcaataatttctactaagtgtagatactatcgacgttcgtcccggtaatttctactaagtgtagatttttttnnnnnnnnnnaagcttggcgtggatccgatatcaactagatcttgagacaaatggcagtattcatccacaattttaaaagaaaaggggggattggggggtacagtgcaggggaaagaatagtagacataatagcaacagacatacaaactaaag

SEQ ID NO: 20394 - DNA, 301 bp, Artificial Sequence
  NTC.13_NTC.31
  crRNA array
  misc_feature (148)..(157): n is a, c, g, or t
cttggctttatatatcttgtggaaaggacgaaacaccgtaatttctactaagtgtagatgaccgttgtatcgcgatcaataatttctactaagtgtagatgccgaccgcgtgattgtaggtaatttctactaagtgtagatttttttnnnnnnnnnnaagcttggcgtggatccgatatcaactagatcttgagacaaatggcagtattcatccacaattttaaaagaaaaggggggattggggggtacagtgcaggggaaagaatagtagacataatagcaacagacatacaaactaaag

SEQ ID NO: 20395 - DNA, 301 bp, Artificial Sequence
  NTC.13_NTC.51
  crRNA array
  misc_feature (148)..(157): n is a, c, g, or t
cttggctttatatatcttgtggaaaggacgaaacaccgtaatttctactaagtgtagatgaccgttgtatcgcgatcaataatttctactaagtgtagattaacgcgcaacacgccaatgtaatttctactaagtgtagatttttttnnnnnnnnnnaagcttggcgtggatccgatatcaactagatcttgagacaaatggcagtattcatccacaattttaaaagaaaaggggggattggggggtacagtgcaggggaaagaatagtagacataatagcaacagacatacaaactaaag

SEQ ID NO: 20396 - DNA, 301 bp, Artificial Sequence
  NTC.13_NTC.23
  crRNA array
  misc_feature (148)..(157): n is a, c, g, or t
cttggctttatatatcttgtggaaaggacgaaacaccgtaatttctactaagtgtagatgaccgttgtatcgcgatcaataatttctactaagtgtagatacgcgctattatcgtaggtgtaatttctactaagtgtagatttttttnnnnnnnnnnaagcttggcgtggatccgatatcaactagatcttgagacaaatggcagtattcatccacaattttaaaagaaaaggggggattggggggtacagtgcaggggaaagaatagtagacataatagcaacagacatacaaactaaag

SEQ ID NO: 20397 - DNA, 301 bp, Artificial Sequence
  NTC.13_NTC.36
  crRNA array
  misc_feature (148)..(157): n is a, c, g, or t
cttggctttatatatcttgtggaaaggacgaaacaccgtaatttctactaagtgtagatgaccgttgtatcgcgatcaataatttctactaagtgtagatcaacccgccgtagcgggccttaatttctactaagtgtagatttttttnnnnnnnnnnaagcttggcgtggatccgatatcaactagatcttgagacaaatggcagtattcatccacaattttaaaagaaaaggggggattggggggtacagtgcaggggaaagaatagtagacataatagcaacagacatacaaactaaag

SEQ ID NO: 20398 - DNA, 301 bp, Artificial Sequence
  NTC.13_NTC.15
  crRNA array
  misc_feature (148)..(157): n is a, c, g, or t
cttggctttatatatcttgtggaaaggacgaaacaccgtaatttctactaagtgtagatgaccgttgtatcgcgatcaataatttctactaagtgtagatgttgtcgtgccgcgaatttataatttctactaagtgtagatttttttnnnnnnnnnnaagcttggcgtggatccgatatcaactagatcttgagacaaatggcagtattcatccacaattttaaaagaaaaggggggattggggggtacagtgcaggggaaagaatagtagacataatagcaacagacatacaaactaaag

SEQ ID NO: 20399 - DNA, 301 bp, Artificial Sequence
  NTC.13_NTC.45
  crRNA array
  misc_feature (148)..(157): n is a, c, g, or t
cttggctttatatatcttgtggaaaggacgaaacaccgtaatttctactaagtgtagatgaccgttgtatcgcgatcaataatttctactaagtgtagatcggaacgcgtgatactagggtaatttctactaagtgtagatttttttnnnnnnnnnnaagcttggcgtggatccgatatcaactagatcttgagacaaatggcagtattcatccacaattttaaaagaaaaggggggattggggggtacagtgcaggggaaagaatagtagacataatagcaacagacatacaaactaaag

SEQ ID NO: 20400 - DNA, 301 bp, Artificial Sequence
  NTC.13_NTC.12
  crRNA array
  misc_feature (148)..(157): n is a, c, g, or t
cttggctttatatatcttgtggaaaggacgaaacaccgtaatttctactaagtgtagatgaccgttgtatcgcgatcaataatttctactaagtgtagatcgccgacgattaatcaatagtaatttctactaagtgtagatttttttnnnnnnnnnnaagcttggcgtggatccgatatcaactagatcttgagacaaatggcagtattcatccacaattttaaaagaaaaggggggattggggggtacagtgcaggggaaagaatagtagacataatagcaacagacatacaaactaaag

SEQ ID NO: 20401 - DNA, 301 bp, Artificial Sequence
  NTC.13_NTC.19
  crRNA array
  misc_feature (148)..(157): n is a, c, g, or t
cttggctttatatatcttgtggaaaggacgaaacaccgtaatttctactaagtgtagatgaccgttgtatcgcgatcaataatttctactaagtgtagatcgtcgtagaacgatacccgataatttctactaagtgtagatttttttnnnnnnnnnnaagcttggcgtggatccgatatcaactagatcttgagacaaatggcagtattcatccacaattttaaaagaaaaggggggattggggggtacagtgcaggggaaagaatagtagacataatagcaacagacatacaaactaaag

SEQ ID NO: 20402 - DNA, 301 bp, Artificial Sequence
  NTC.13_NTC.20
  crRNA array
  misc_feature (148)..(157): n is a, c, g, or t
cttggctttatatatcttgtggaaaggacgaaacaccgtaatttctactaagtgtagatgaccgttgtatcgcgatcaataatttctactaagtgtagatattccggcgcgaccagaagataatttctactaagtgtagatttttttnnnnnnnnnnaagcttggcgtggatccgatatcaactagatcttgagacaaatggcagtattcatccacaattttaaaagaaaaggggggattggggggtacagtgcaggggaaagaatagtagacataatagcaacagacatacaaactaaag

SEQ ID NO: 20403 - DNA, 301 bp, Artificial Sequence
  NTC.13_NTC.48
  crRNA array
  misc_feature (148)..(157): n is a, c, g, or t
cttggctttatatatcttgtggaaaggacgaaacaccgtaatttctactaagtgtagatgaccgttgtatcgcgatcaataatttctactaagtgtagatcggtcgactacggctgttagtaatttctactaagtgtagatttttttnnnnnnnnnnaagcttggcgtggatccgatatcaactagatcttgagacaaatggcagtattcatccacaattttaaaagaaaaggggggattggggggtacagtgcaggggaaagaatagtagacataatagcaacagacatacaaactaaag

SEQ ID NO: 20404 - DNA, 301 bp, Artificial Sequence
  NTC.13_NTC.26
  crRNA array
  misc_feature (148)..(157): n is a, c, g, or t
cttggctttatatatcttgtggaaaggacgaaacaccgtaatttctactaagtgtagatgaccgttgtatcgcgatcaataatttctactaagtgtagatcgcgacggcggttttaacactaatttctactaagtgtagatttttttnnnnnnnnnnaagcttggcgtggatccgatatcaactagatcttgagacaaatggcagtattcatccacaattttaaaagaaaaggggggattggggggtacagtgcaggggaaagaatagtagacataatagcaacagacatacaaactaaag

SEQ ID NO: 20405 - DNA, 301 bp, Artificial Sequence
  NTC.13_NTC.27
  crRNA array
  misc_feature (148)..(157): n is a, c, g, or t
cttggctttatatatcttgtggaaaggacgaaacaccgtaatttctactaagtgtagatgaccgttgtatcgcgatcaataatttctactaagtgtagatgtcgcgttgcgaccggcgcttaatttctactaagtgtagatttttttnnnnnnnnnnaagcttggcgtggatccgatatcaactagatcttgagacaaatggcagtattcatccacaattttaaaagaaaaggggggattggggggtacagtgcaggggaaagaatagtagacataatagcaacagacatacaaactaaag

SEQ ID NO: 20406 - DNA, 301 bp, Artificial Sequence
  NTC.13_NTC.34
  crRNA array
  misc_feature (148)..(157): n is a, c, g, or t
cttggctttatatatcttgtggaaaggacgaaacaccgtaatttctactaagtgtagatgaccgttgtatcgcgatcaataatttctactaagtgtagattagcgttcgacacgtgaaactaatttctactaagtgtagatttttttnnnnnnnnnnaagcttggcgtggatccgatatcaactagatcttgagacaaatggcagtattcatccacaattttaaaagaaaaggggggattggggggtacagtgcaggggaaagaatagtagacataatagcaacagacatacaaactaaag

SEQ ID NO: 20407 - DNA, 301 bp, Artificial Sequence
  NTC.13_NTC.16
  crRNA array
  misc_feature (148)..(157): n is a, c, g, or t
cttggctttatatatcttgtggaaaggacgaaacaccgtaatttctactaagtgtagatgaccgttgtatcgcgatcaataatttctactaagtgtagatcggtacgttagacgaaaatttaatttctactaagtgtagatttttttnnnnnnnnnnaagcttggcgtggatccgatatcaactagatcttgagacaaatggcagtattcatccacaattttaaaagaaaaggggggattggggggtacagtgcaggggaaagaatagtagacataatagcaacagacatacaaactaaag

SEQ ID NO: 20408 - DNA, 301 bp, Artificial Sequence
  NTC.13_NTC.4
  crRNA array
  misc_feature (148)..(157): n is a, c, g, or t
cttggctttatatatcttgtggaaaggacgaaacaccgtaatttctactaagtgtagatgaccgttgtatcgcgatcaataatttctactaagtgtagatatacccgtcgcgaacgtgagtaatttctactaagtgtagatttttttnnnnnnnnnnaagcttggcgtggatccgatatcaactagatcttgagacaaatggcagtattcatccacaattttaaaagaaaaggggggattggggggtacagtgcaggggaaagaatagtagacataatagcaacagacatacaaactaaag

SEQ ID NO: 20409 - DNA, 301 bp, Artificial Sequence
  NTC.13_NTC.42
  crRNA array
  misc_feature (148)..(157): n is a, c, g, or t
cttggctttatatatcttgtggaaaggacgaaacaccgtaatttctactaagtgtagatgaccgttgtatcgcgatcaataatttctactaagtgtagatggtcaaatcgcggcgataactaatttctactaagtgtagatttttttnnnnnnnnnnaagcttggcgtggatccgatatcaactagatcttgagacaaatggcagtattcatccacaattttaaaagaaaaggggggattggggggtacagtgcaggggaaagaatagtagacataatagcaacagacatacaaactaaag

SEQ ID NO: 20410 - DNA, 301 bp, Artificial Sequence
  NTC.13_NTC.22
  crRNA array
  misc_feature (148)..(157): n is a, c, g, or t
cttggctttatatatcttgtggaaaggacgaaacaccgtaatttctactaagtgtagatgaccgttgtatcgcgatcaataatttctactaagtgtagatgcgcgtcaacgtaatgtgcctaatttctactaagtgtagatttttttnnnnnnnnnnaagcttggcgtggatccgatatcaactagatcttgagacaaatggcagtattcatccacaattttaaaagaaaaggggggattggggggtacagtgcaggggaaagaatagtagacataatagcaacagacatacaaactaaag

SEQ ID NO: 20411 - DNA, 301 bp, Artificial Sequence
  NTC.13_NTC.17
  crRNA array
  misc_feature (148)..(157): n is a, c, g, or t
cttggctttatatatcttgtggaaaggacgaaacaccgtaatttctactaagtgtagatgaccgttgtatcgcgatcaataatttctactaagtgtagattatcgaacgctatcgaacgttaatttctactaagtgtagatttttttnnnnnnnnnnaagcttggcgtggatccgatatcaactagatcttgagacaaatggcagtattcatccacaattttaaaagaaaaggggggattggggggtacagtgcaggggaaagaatagtagacataatagcaacagacatacaaactaaag

SEQ ID NO: 20412 - DNA, 301 bp, Artificial Sequence
  NTC.13_NTC.9
  crRNA array
  misc_feature (148)..(157): n is a, c, g, or t
cttggctttatatatcttgtggaaaggacgaaacaccgtaatttctactaagtgtagatgaccgttgtatcgcgatcaataatttctactaagtgtagatatcgccgtacggctatggcataatttctactaagtgtagatttttttnnnnnnnnnnaagcttggcgtggatccgatatcaactagatcttgagacaaatggcagtattcatccacaattttaaaagaaaaggggggattggggggtacagtgcaggggaaagaatagtagacataatagcaacagacatacaaactaaag

SEQ ID NO: 20413 - DNA, 301 bp, Artificial Sequence
  NTC.13_NTC.30
  crRNA array
  misc_feature (148)..(157): n is a, c, g, or t
cttggctttatatatcttgtggaaaggacgaaacaccgtaatttctactaagtgtagatgaccgttgtatcgcgatcaataatttctactaagtgtagatcgatcgtacgggtgtcctaataatttctactaagtgtagatttttttnnnnnnnnnnaagcttggcgtggatccgatatcaactagatcttgagacaaatggcagtattcatccacaattttaaaagaaaaggggggattggggggtacagtgcaggggaaagaatagtagacataatagcaacagacatacaaactaaag

SEQ ID NO: 20414 - DNA, 301 bp, Artificial Sequence
  NTC.13_NTC.8
  crRNA array
  misc_feature (148)..(157): n is a, c, g, or t
cttggctttatatatcttgtggaaaggacgaaacaccgtaatttctactaagtgtagatgaccgttgtatcgcgatcaataatttctactaagtgtagatcgaccgaggttacgctgggataatttctactaagtgtagatttttttnnnnnnnnnnaagcttggcgtggatccgatatcaactagatcttgagacaaatggcagtattcatccacaattttaaaagaaaaggggggattggggggtacagtgcaggggaaagaatagtagacataatagcaacagacatacaaactaaag

SEQ ID NO: 20415 - DNA, 301 bp, Artificial Sequence
  NTC.13_NTC.46
  crRNA array
  misc_feature (148)..(157): n is a, c, g, or t
cttggctttatatatcttgtggaaaggacgaaacaccgtaatttctactaagtgtagatgaccgttgtatcgcgatcaataatttctactaagtgtagatagcgggtcgtagacgcgcggtaatttctactaagtgtagatttttttnnnnnnnnnnaagcttggcgtggatccgatatcaactagatcttgagacaaatggcagtattcatccacaattttaaaagaaaaggggggattggggggtacagtgcaggggaaagaatagtagacataatagcaacagacatacaaactaaag

SEQ ID NO: 20416 - DNA, 301 bp, Artificial Sequence
  NTC.13_NTC.35
  crRNA array
  misc_feature (148)..(157): n is a, c, g, or t
cttggctttatatatcttgtggaaaggacgaaacaccgtaatttctactaagtgtagatgaccgttgtatcgcgatcaataatttctactaagtgtagattggcgcgtaatcgctattcgtaatttctactaagtgtagatttttttnnnnnnnnnnaagcttggcgtggatccgatatcaactagatcttgagacaaatggcagtattcatccacaattttaaaagaaaaggggggattggggggtacagtgcaggggaaagaatagtagacataatagcaacagacatacaaactaaag

SEQ ID NO: 20417 - DNA, 301 bp, Artificial Sequence
  NTC.13_NTC.10
  crRNA array
  misc_feature (148)..(157): n is a, c, g, or t
cttggctttatatatcttgtggaaaggacgaaacaccgtaatttctactaagtgtagatgaccgttgtatcgcgatcaataatttctactaagtgtagatcgctaagttcgcgcgggccgtaatttctactaagtgtagatttttttnnnnnnnnnnaagcttggcgtggatccgatatcaactagatcttgagacaaatggcagtattcatccacaattttaaaagaaaaggggggattggggggtacagtgcaggggaaagaatagtagacataatagcaacagacatacaaactaaag

SEQ ID NO: 20418 - DNA, 301 bp, Artificial Sequence
  NTC.13_NTC.11
  crRNA array
  misc_feature (148)..(157): n is a, c, g, or t
cttggctttatatatcttgtggaaaggacgaaacaccgtaatttctactaagtgtagatgaccgttgtatcgcgatcaataatttctactaagtgtagatcgttcgtcgacgaagcaatctaatttctactaagtgtagatttttttnnnnnnnnnnaagcttggcgtggatccgatatcaactagatcttgagacaaatggcagtattcatccacaattttaaaagaaaaggggggattggggggtacagtgcaggggaaagaatagtagacataatagcaacagacatacaaactaaag

SEQ ID NO: 20419 - DNA, 301 bp, Artificial Sequence
  NTC.13_NTC.14
  crRNA array
  misc_feature (148)..(157): n is a, c, g, or t
cttggctttatatatcttgtggaaaggacgaaacaccgtaatttctactaagtgtagatgaccgttgtatcgcgatcaataatttctactaagtgtagatccgttcgtgcgatagtgttttaatttctactaagtgtagatttttttnnnnnnnnnnaagcttggcgtggatccgatatcaactagatcttgagacaaatggcagtattcatccacaattttaaaagaaaaggggggattggggggtacagtgcaggggaaagaatagtagacataatagcaacagacatacaaactaaag

SEQ ID NO: 20420 - DNA, 301 bp, Artificial Sequence
  NTC.13_NTC.28
  crRNA array
  misc_feature (148)..(157): n is a, c, g, or t
cttggctttatatatcttgtggaaaggacgaaacaccgtaatttctactaagtgtagatgaccgttgtatcgcgatcaataatttctactaagtgtagataccgctaatcggcgtaaacttaatttctactaagtgtagatttttttnnnnnnnnnnaagcttggcgtggatccgatatcaactagatcttgagacaaatggcagtattcatccacaattttaaaagaaaaggggggattggggggtacagtgcaggggaaagaatagtagacataatagcaacagacatacaaactaaag

SEQ ID NO: 20421 - DNA, 301 bp, Artificial Sequence
  NTC.2_NTC.0
  crRNA array
  misc_feature (148)..(157): n is a, c, g, or t
cttggctttatatatcttgtggaaaggacgaaacaccgtaatttctactaagtgtagatttatgtcgcgccgcgacccgtaatttctactaagtgtagattatagcgtcgcgcgctaatttaatttctactaagtgtagatttttttnnnnnnnnnnaagcttggcgtggatccgatatcaactagatcttgagacaaatggcagtattcatccacaattttaaaagaaaaggggggattggggggtacagtgcaggggaaagaatagtagacataatagcaacagacatacaaactaaag

SEQ ID NO: 20422 - DNA, 301 bp, Artificial Sequence
  NTC.2_NTC.21
  crRNA array
  misc_feature (148)..(157): n is a, c, g, or t
cttggctttatatatcttgtggaaaggacgaaacaccgtaatttctactaagtgtagatttatgtcgcgccgcgacccgtaatttctactaagtgtagatgtataacttcgcgcggtccgtaatttctactaagtgtagatttttttnnnnnnnnnnaagcttggcgtggatccgatatcaactagatcttgagacaaatggcagtattcatccacaattttaaaagaaaaggggggattggggggtacagtgcaggggaaagaatagtagacataatagcaacagacatacaaactaaag

SEQ ID NO: 20423 - DNA, 301 bp, Artificial Sequence
  NTC.2_NTC.43
  crRNA array
  misc_feature (148)..(157): n is a, c, g, or t
cttggctttatatatcttgtggaaaggacgaaacaccgtaatttctactaagtgtagatttatgtcgcgccgcgacccgtaatttctactaagtgtagatcgactcgcgcattgaactggtaatttctactaagtgtagatttttttnnnnnnnnnnaagcttggcgtggatccgatatcaactagatcttgagacaaatggcagtattcatccacaattttaaaagaaaaggggggattggggggtacagtgcaggggaaagaatagtagacataatagcaacagacatacaaactaaag

SEQ ID NO: 20424 - DNA, 301 bp, Artificial Sequence
  NTC.2_NTC.44
  crRNA array
  misc_feature (148)..(157): n is a, c, g, or t
cttggctttatatatcttgtggaaaggacgaaacaccgtaatttctactaagtgtagatttatgtcgcgccgcgacccgtaatttctactaagtgtagatagcgtcgtacgatttatcgttaatttctactaagtgtagatttttttnnnnnnnnnnaagcttggcgtggatccgatatcaactagatcttgagacaaatggcagtattcatccacaattttaaaagaaaaggggggattggggggtacagtgcaggggaaagaatagtagacataatagcaacagacatacaaactaaag

SEQ ID NO: 20425 - DNA, 301 bp, Artificial Sequence
  NTC.2_NTC.37
  crRNA array
  misc_feature (148)..(157): n is a, c, g, or t
cttggctttatatatcttgtggaaaggacgaaacaccgtaatttctactaagtgtagatttatgtcgcgccgcgacccgtaatttctactaagtgtagattttgcgttgacgcgattacttaatttctactaagtgtagatttttttnnnnnnnnnnaagcttggcgtggatccgatatcaactagatcttgagacaaatggcagtattcatccacaattttaaaagaaaaggggggattggggggtacagtgcaggggaaagaatagtagacataatagcaacagacatacaaactaaag

SEQ ID NO: 20426 - DNA, 301 bp, Artificial Sequence
  NTC.2_NTC.7
  crRNA array
  misc_feature (148)..(157): n is a, c, g, or t
cttggctttatatatcttgtggaaaggacgaaacaccgtaatttctactaagtgtagatttatgtcgcgccgcgacccgtaatttctactaagtgtagatcgccgaacggataagactattaatttctactaagtgtagatttttttnnnnnnnnnnaagcttggcgtggatccgatatcaactagatcttgagacaaatggcagtattcatccacaattttaaaagaaaaggggggattggggggtacagtgcaggggaaagaatagtagacataatagcaacagacatacaaactaaag

SEQ ID NO: 20427 - DNA, 301 bp, Artificial Sequence
  NTC.2_NTC.49
  crRNA array
  misc_feature (148)..(157): n is a, c, g, or t
cttggctttatatatcttgtggaaaggacgaaacaccgtaatttctactaagtgtagatttatgtcgcgccgcgacccgtaatttctactaagtgtagattcggggcgcgtcaactgaattaatttctactaagtgtagatttttttnnnnnnnnnnaagcttggcgtggatccgatatcaactagatcttgagacaaatggcagtattcatccacaattttaaaagaaaaggggggattggggggtacagtgcaggggaaagaatagtagacataatagcaacagacatacaaactaaag

SEQ ID NO: 20428 - DNA, 301 bp, Artificial Sequence
  NTC.2_NTC.50
  crRNA array
  misc_feature (148)..(157): n is a, c, g, or t
cttggctttatatatcttgtggaaaggacgaaacaccgtaatttctactaagtgtagatttatgtcgcgccgcgacccgtaatttctactaagtgtagatattgccgctcgcgcaaaatctaatttctactaagtgtagatttttttnnnnnnnnnnaagcttggcgtggatccgatatcaactagatcttgagacaaatggcagtattcatccacaattttaaaagaaaaggggggattggggggtacagtgcaggggaaagaatagtagacataatagcaacagacatacaaactaaag

SEQ ID NO: 20429 - DNA, 301 bp, Artificial Sequence
  NTC.2_NTC.39
  crRNA array
  misc_feature (148)..(157): n is a, c, g, or t
cttggctttatatatcttgtggaaaggacgaaacaccgtaatttctactaagtgtagatttatgtcgcgccgcgacccgtaatttctactaagtgtagatccggacgttataacgtttcttaatttctactaagtgtagatttttttnnnnnnnnnnaagcttggcgtggatccgatatcaactagatcttgagacaaatggcagtattcatccacaattttaaaagaaaaggggggattggggggtacagtgcaggggaaagaatagtagacataatagcaacagacatacaaactaaag

SEQ ID NO: 20430 - DNA, 301 bp, Artificial Sequence
  NTC.2_NTC.29
  crRNA array
  misc_feature (148)..(157): n is a, c, g, or t
cttggctttatatatcttgtggaaaggacgaaacaccgtaatttctactaagtgtagatttatgtcgcgccgcgacccgtaatttctactaagtgtagatcgcgatctataccgtctatataatttctactaagtgtagatttttttnnnnnnnnnnaagcttggcgtggatccgatatcaactagatcttgagacaaatggcagtattcatccacaattttaaaagaaaaggggggattggggggtacagtgcaggggaaagaatagtagacataatagcaacagacatacaaactaaag

SEQ ID NO: 20431 - DNA, 301 bp, Artificial Sequence
  NTC.2_NTC.25
  crRNA array
  misc_feature (148)..(157): n is a, c, g, or t
cttggctttatatatcttgtggaaaggacgaaacaccgtaatttctactaagtgtagatttatgtcgcgccgcgacccgtaatttctactaagtgtagattcgcgttatcgtgccgtgcgtaatttctactaagtgtagatttttttnnnnnnnnnnaagcttggcgtggatccgatatcaactagatcttgagacaaatggcagtattcatccacaattttaaaagaaaaggggggattggggggtacagtgcaggggaaagaatagtagacataatagcaacagacatacaaactaaag

SEQ ID NO: 20432 - DNA, 301 bp, Artificial Sequence
  NTC.2_NTC.3
  crRNA array
  misc_feature (148)..(157): n is a, c, g, or t
cttggctttatatatcttgtggaaaggacgaaacaccgtaatttctactaagtgtagatttatgtcgcgccgcgacccgtaatttctactaagtgtagattcgacgcgagacgacgtacataatttctactaagtgtagatttttttnnnnnnnnnnaagcttggcgtggatccgatatcaactagatcttgagacaaatggcagtattcatccacaattttaaaagaaaaggggggattggggggtacagtgcaggggaaagaatagtagacataatagcaacagacatacaaactaaag

SEQ ID NO: 20433 - DNA, 301 bp, Artificial Sequence
  NTC.2_NTC.47
  crRNA array
  misc_feature (148)..(157): n is a, c, g, or t
cttggctttatatatcttgtggaaaggacgaaacaccgtaatttctactaagtgtagatttatgtcgcgccgcgacccgtaatttctactaagtgtagattctcgtatcgcgattgttaataatttctactaagtgtagatttttttnnnnnnnnnnaagcttggcgtggatccgatatcaactagatcttgagacaaatggcagtattcatccacaattttaaaagaaaaggggggattggggggtacagtgcaggggaaagaatagtagacataatagcaacagacatacaaactaaag

SEQ ID NO: 20434 - DNA, 301 bp, Artificial Sequence
  NTC.2_NTC.32
  crRNA array
  misc_feature (148)..(157): n is a, c, g, or t
cttggctttatatatcttgtggaaaggacgaaacaccgtaatttctactaagtgtagatttatgtcgcgccgcgacccgtaatttctactaagtgtagatgcacgttacgcccgggtcactaatttctactaagtgtagatttttttnnnnnnnnnnaagcttggcgtggatccgatatcaactagatcttgagacaaatggcagtattcatccacaattttaaaagaaaaggggggattggggggtacagtgcaggggaaagaatagtagacataatagcaacagacatacaaactaaag

SEQ ID NO: 20435 - DNA, 301 bp, Artificial Sequence
  NTC.2_NTC.40
  crRNA array
  misc_feature (148)..(157): n is a, c, g, or t
cttggctttatatatcttgtggaaaggacgaaacaccgtaatttctactaagtgtagatttatgtcgcgccgcgacccgtaatttctactaagtgtagatattcgcgaacccggccggaataatttctactaagtgtagatttttttnnnnnnnnnnaagcttggcgtggatccgatatcaactagatcttgagacaaatggcagtattcatccacaattttaaaagaaaaggggggattggggggtacagtgcaggggaaagaatagtagacataatagcaacagacatacaaactaaag

SEQ ID NO: 20436 - DNA, 301 bp, Artificial Sequence
  NTC.2_NTC.5
  crRNA array
  misc_feature (148)..(157): n is a, c, g, or t
cttggctttatatatcttgtggaaaggacgaaacaccgtaatttctactaagtgtagatttatgtcgcgccgcgacccgtaatttctactaagtgtagatgcttacgcgtcgcgaatgtataatttctactaagtgtagatttttttnnnnnnnnnnaagcttggcgtggatccgatatcaactagatcttgagacaaatggcagtattcatccacaattttaaaagaaaaggggggattggggggtacagtgcaggggaaagaatagtagacataatagcaacagacatacaaactaaag

SEQ ID NO: 20437 - DNA, 301 bp, Artificial Sequence
  NTC.2_NTC.33
  crRNA array
  misc_feature (148)..(157): n is a, c, g, or t
cttggctttatatatcttgtggaaaggacgaaacaccgtaatttctactaagtgtagatttatgtcgcgccgcgacccgtaatttctactaagtgtagattaagcgaccgacgcattcgctaatttctactaagtgtagatttttttnnnnnnnnnnaagcttggcgtggatccgatatcaactagatcttgagacaaatggcagtattcatccacaattttaaaagaaaaggggggattggggggtacagtgcaggggaaagaatagtagacataatagcaacagacatacaaactaaag

SEQ ID NO: 20438 - DNA, 301 bp, Artificial Sequence
  NTC.2_NTC.1
  crRNA array
  misc_feature (148)..(157): n is a, c, g, or t
cttggctttatatatcttgtggaaaggacgaaacaccgtaatttctactaagtgtagatttatgtcgcgccgcgacccgtaatttctactaagtgtagatcgcgtaaccgttccggctcctaatttctactaagtgtagatttttttnnnnnnnnnnaagcttggcgtggatccgatatcaactagatcttgagacaaatggcagtattcatccacaattttaaaagaaaaggggggattggggggtacagtgcaggggaaagaatagtagacataatagcaacagacatacaaactaaag

SEQ ID NO: 20439 - DNA, 301 bp, Artificial Sequence
  NTC.2_NTC.6
  crRNA array
  misc_feature (148)..(157): n is a, c, g, or t
cttggctttatatatcttgtggaaaggacgaaacaccgtaatttctactaagtgtagatttatgtcgcgccgcgacccgtaatttctactaagtgtagatcgaatcgcgcctacgggaattaatttctactaagtgtagatttttttnnnnnnnnnnaagcttggcgtggatccgatatcaactagatcttgagacaaatggcagtattcatccacaattttaaaagaaaaggggggattggggggtacagtgcaggggaaagaatagtagacataatagcaacagacatacaaactaaag

SEQ ID NO: 20440 - DNA, 301 bp, Artificial Sequence
  NTC.2_NTC.38
  crRNA array
  misc_feature (148)..(157): n is a, c, g, or t
cttggctttatatatcttgtggaaaggacgaaacaccgtaatttctactaagtgtagatttatgtcgcgccgcgacccgtaatttctactaagtgtagataacggagcgcgatactaccataatttctactaagtgtagatttttttnnnnnnnnnnaagcttggcgtggatccgatatcaactagatcttgagacaaatggcagtattcatccacaattttaaaagaaaaggggggattggggggtacagtgcaggggaaagaatagtagacataatagcaacagacatacaaactaaag

SEQ ID NO: 20441 - DNA, 301 bp, Artificial Sequence
  NTC.2_NTC.41
  crRNA array
  misc_feature (148)..(157): n is a, c, g, or t
cttggctttatatatcttgtggaaaggacgaaacaccgtaatttctactaagtgtagatttatgtcgcgccgcgacccgtaatttctactaagtgtagatttgatggcgcgacgcgttattaatttctactaagtgtagatttttttnnnnnnnnnnaagcttggcgtggatccgatatcaactagatcttgagacaaatggcagtattcatccacaattttaaaagaaaaggggggattggggggtacagtgcaggggaaagaatagtagacataatagcaacagacatacaaactaaag

SEQ ID NO: 20442 - DNA, 301 bp, Artificial Sequence
  NTC.2_NTC.18
  crRNA array
  misc_feature (148)..(157): n is a, c, g, or t
cttggctttatatatcttgtggaaaggacgaaacaccgtaatttctactaagtgtagatttatgtcgcgccgcgacccgtaatttctactaagtgtagattccggttacgaccggcaaaataatttctactaagtgtagatttttttnnnnnnnnnnaagcttggcgtggatccgatatcaactagatcttgagacaaatggcagtattcatccacaattttaaaagaaaaggggggattggggggtacagtgcaggggaaagaatagtagacataatagcaacagacatacaaactaaag

SEQ ID NO: 20443 - DNA, 301 bp, Artificial Sequence
  NTC.2_NTC.24
  crRNA array
  misc_feature (148)..(157): n is a, c, g, or t
cttggctttatatatcttgtggaaaggacgaaacaccgtaatttctactaagtgtagatttatgtcgcgccgcgacccgtaatttctactaagtgtagatactatcgacgttcgtcccggtaatttctactaagtgtagatttttttnnnnnnnnnnaagcttggcgtggatccgatatcaactagatcttgagacaaatggcagtattcatccacaattttaaaagaaaaggggggattggggggtacagtgcaggggaaagaatagtagacataatagcaacagacatacaaactaaag

SEQ ID NO: 20444 - DNA, 301 bp, Artificial Sequence
  NTC.2_NTC.31
  crRNA array
  misc_feature (148)..(157): n is a, c, g, or t
cttggctttatatatcttgtggaaaggacgaaacaccgtaatttctactaagtgtagatttatgtcgcgccgcgacccgtaatttctactaagtgtagatgccgaccgcgtgattgtaggtaatttctactaagtgtagatttttttnnnnnnnnnnaagcttggcgtggatccgatatcaactagatcttgagacaaatggcagtattcatccacaattttaaaagaaaaggggggattggggggtacagtgcaggggaaagaatagtagacataatagcaacagacatacaaactaaag

SEQ ID NO: 20445 - DNA, 301 bp, Artificial Sequence
  NTC.2_NTC.51
  crRNA array
  misc_feature (148)..(157): n is a, c, g, or t
cttggctttatatatcttgtggaaaggacgaaacaccgtaatttctactaagtgtagatttatgtcgcgccgcgacccgtaatttctactaagtgtagattaacgcgcaacacgccaatgtaatttctactaagtgtagatttttttnnnnnnnnnnaagcttggcgtggatccgatatcaactagatcttgagacaaatggcagtattcatccacaattttaaaagaaaaggggggattggggggtacagtgcaggggaaagaatagtagacataatagcaacagacatacaaactaaag

SEQ ID NO: 20446 - DNA, 301 bp, Artificial Sequence
  NTC.2_NTC.23
  crRNA array
  misc_feature (148)..(157): n is a, c, g, or t
cttggctttatatatcttgtggaaaggacgaaacaccgtaatttctactaagtgtagatttatgtcgcgccgcgacccgtaatttctactaagtgtagatacgcgctattatcgtaggtgtaatttctactaagtgtagatttttttnnnnnnnnnnaagcttggcgtggatccgatatcaactagatcttgagacaaatggcagtattcatccacaattttaaaagaaaaggggggattggggggtacagtgcaggggaaagaatagtagacataatagcaacagacatacaaactaaag

SEQ ID NO: 20447 - DNA, 301 bp, Artificial Sequence
  NTC.2_NTC.36
  crRNA array
  misc_feature (148)..(157): n is a, c, g, or t
cttggctttatatatcttgtggaaaggacgaaacaccgtaatttctactaagtgtagatttatgtcgcgccgcgacccgtaatttctactaagtgtagatcaacccgccgtagcgggccttaatttctactaagtgtagatttttttnnnnnnnnnnaagcttggcgtggatccgatatcaactagatcttgagacaaatggcagtattcatccacaattttaaaagaaaaggggggattggggggtacagtgcaggggaaagaatagtagacataatagcaacagacatacaaactaaag

SEQ ID NO: 20448 - DNA, 301 bp, Artificial Sequence
  NTC.2_NTC.15
  crRNA array
  misc_feature (148)..(157): n is a, c, g, or t
cttggctttatatatcttgtggaaaggacgaaacaccgtaatttctactaagtgtagatttatgtcgcgccgcgacccgtaatttctactaagtgtagatgttgtcgtgccgcgaatttataatttctactaagtgtagatttttttnnnnnnnnnnaagcttggcgtggatccgatatcaactagatcttgagacaaatggcagtattcatccacaattttaaaagaaaaggggggattggggggtacagtgcaggggaaagaatagtagacataatagcaacagacatacaaactaaag

SEQ ID NO: 20449 - DNA, 301 bp, Artificial Sequence
  NTC.2_NTC.45
  crRNA array
  misc_feature (148)..(157): n is a, c, g, or t
cttggctttatatatcttgtggaaaggacgaaacaccgtaatttctactaagtgtagatttatgtcgcgccgcgacccgtaatttctactaagtgtagatcggaacgcgtgatactagggtaatttctactaagtgtagatttttttnnnnnnnnnnaagcttggcgtggatccgatatcaactagatcttgagacaaatggcagtattcatccacaattttaaaagaaaaggggggattggggggtacagtgcaggggaaagaatagtagacataatagcaacagacatacaaactaaag

SEQ ID NO: 20450 - DNA, 301 bp, Artificial Sequence
  NTC.2_NTC.12
  crRNA array
  misc_feature (148)..(157): n is a, c, g, or t
cttggctttatatatcttgtggaaaggacgaaacaccgtaatttctactaagtgtagatttatgtcgcgccgcgacccgtaatttctactaagtgtagatcgccgacgattaatcaatagtaatttctactaagtgtagatttttttnnnnnnnnnnaagcttggcgtggatccgatatcaactagatcttgagacaaatggcagtattcatccacaattttaaaagaaaaggggggattggggggtacagtgcaggggaaagaatagtagacataatagcaacagacatacaaactaaag

SEQ ID NO: 20451 - DNA, 301 bp, Artificial Sequence
  NTC.2_NTC.19
  crRNA array
  misc_feature (148)..(157): n is a, c, g, or t
cttggctttatatatcttgtggaaaggacgaaacaccgtaatttctactaagtgtagatttatgtcgcgccgcgacccgtaatttctactaagtgtagatcgtcgtagaacgatacccgataatttctactaagtgtagatttttttnnnnnnnnnnaagcttggcgtggatccgatatcaactagatcttgagacaaatggcagtattcatccacaattttaaaagaaaaggggggattggggggtacagtgcaggggaaagaatagtagacataatagcaacagacatacaaactaaag

SEQ ID NO: 20452 - DNA, 301 bp, Artificial Sequence
  NTC.2_NTC.20
  crRNA array
  misc_feature (148)..(157): n is a, c, g, or t
cttggctttatatatcttgtggaaaggacgaaacaccgtaatttctactaagtgtagatttatgtcgcgccgcgacccgtaatttctactaagtgtagatattccggcgcgaccagaagataatttctactaagtgtagatttttttnnnnnnnnnnaagcttggcgtggatccgatatcaactagatcttgagacaaatggcagtattcatccacaattttaaaagaaaaggggggattggggggtacagtgcaggggaaagaatagtagacataatagcaacagacatacaaactaaag

SEQ ID NO: 20453 - DNA, 301 bp, Artificial Sequence
  NTC.2_NTC.48
  crRNA array
  misc_feature (148)..(157): n is a, c, g, or t
cttggctttatatatcttgtggaaaggacgaaacaccgtaatttctactaagtgtagatttatgtcgcgccgcgacccgtaatttctactaagtgtagatcggtcgactacggctgttagtaatttctactaagtgtagatttttttnnnnnnnnnnaagcttggcgtggatccgatatcaactagatcttgagacaaatggcagtattcatccacaattttaaaagaaaaggggggattggggggtacagtgcaggggaaagaatagtagacataatagcaacagacatacaaactaaag

SEQ ID NO: 20454 - DNA, 301 bp, Artificial Sequence
  NTC.2_NTC.26
  crRNA array
  misc_feature (148)..(157): n is a, c, g, or t
cttggctttatatatcttgtggaaaggacgaaacaccgtaatttctactaagtgtagatttatgtcgcgccgcgacccgtaatttctactaagtgtagatcgcgacggcggttttaacactaatttctactaagtgtagatttttttnnnnnnnnnnaagcttggcgtggatccgatatcaactagatcttgagacaaatggcagtattcatccacaattttaaaagaaaaggggggattggggggtacagtgcaggggaaagaatagtagacataatagcaacagacatacaaactaaag

SEQ ID NO: 20455 - DNA, 301 bp, Artificial Sequence
  NTC.2_NTC.27
  crRNA array
  misc_feature (148)..(157): n is a, c, g, or t
cttggctttatatatcttgtggaaaggacgaaacaccgtaatttctactaagtgtagatttatgtcgcgccgcgacccgtaatttctactaagtgtagatgtcgcgttgcgaccggcgcttaatttctactaagtgtagatttttttnnnnnnnnnnaagcttggcgtggatccgatatcaactagatcttgagacaaatggcagtattcatccacaattttaaaagaaaaggggggattggggggtacagtgcaggggaaagaatagtagacataatagcaacagacatacaaactaaag

SEQ ID NO: 20456 - DNA, 301 bp, Artificial Sequence
  NTC.2_NTC.34
  crRNA array
  misc_feature (148)..(157): n is a, c, g, or t
cttggctttatatatcttgtggaaaggacgaaacaccgtaatttctactaagtgtagatttatgtcgcgccgcgacccgtaatttctactaagtgtagattagcgttcgacacgtgaaactaatttctactaagtgtagatttttttnnnnnnnnnnaagcttggcgtggatccgatatcaactagatcttgagacaaatggcagtattcatccacaattttaaaagaaaaggggggattggggggtacagtgcaggggaaagaatagtagacataatagcaacagacatacaaactaaag

SEQ ID NO: 20457 - DNA, 301 bp, Artificial Sequence
  NTC.2_NTC.16
  crRNA array
  misc_feature (148)..(157): n is a, c, g, or t
cttggctttatatatcttgtggaaaggacgaaacaccgtaatttctactaagtgtagatttatgtcgcgccgcgacccgtaatttctactaagtgtagatcggtacgttagacgaaaatttaatttctactaagtgtagatttttttnnnnnnnnnnaagcttggcgtggatccgatatcaactagatcttgagacaaatggcagtattcatccacaattttaaaagaaaaggggggattggggggtacagtgcaggggaaagaatagtagacataatagcaacagacatacaaactaaag

SEQ ID NO: 20458 - DNA, 301 bp, Artificial Sequence
  NTC.2_NTC.4
  crRNA array
  misc_feature (148)..(157): n is a, c, g, or t
cttggctttatatatcttgtggaaaggacgaaacaccgtaatttctactaagtgtagatttatgtcgcgccgcgacccgtaatttctactaagtgtagatatacccgtcgcgaacgtgagtaatttctactaagtgtagatttttttnnnnnnnnnnaagcttggcgtggatccgatatcaactagatcttgagacaaatggcagtattcatccacaattttaaaagaaaaggggggattggggggtacagtgcaggggaaagaatagtagacataatagcaacagacatacaaactaaag

SEQ ID NO: 20459 - DNA, 301 bp, Artificial Sequence
  NTC.2_NTC.42
  crRNA array
  misc_feature (148)..(157): n is a, c, g, or t
cttggctttatatatcttgtggaaaggacgaaacaccgtaatttctactaagtgtagatttatgtcgcgccgcgacccgtaatttctactaagtgtagatggtcaaatcgcggcgataactaatttctactaagtgtagatttttttnnnnnnnnnnaagcttggcgtggatccgatatcaactagatcttgagacaaatggcagtattcatccacaattttaaaagaaaaggggggattggggggtacagtgcaggggaaagaatagtagacataatagcaacagacatacaaactaaag

SEQ ID NO: 20460 - DNA, 301 bp, Artificial Sequence
  NTC.2_NTC.22
  crRNA array
  misc_feature (148)..(157): n is a, c, g, or t
cttggctttatatatcttgtggaaaggacgaaacaccgtaatttctactaagtgtagatttatgtcgcgccgcgacccgtaatttctactaagtgtagatgcgcgtcaacgtaatgtgcctaatttctactaagtgtagatttttttnnnnnnnnnnaagcttggcgtggatccgatatcaactagatcttgagacaaatggcagtattcatccacaattttaaaagaaaaggggggattggggggtacagtgcaggggaaagaatagtagacataatagcaacagacatacaaactaaag

SEQ ID NO: 20461 - DNA, 301 bp, Artificial Sequence
  NTC.2_NTC.17
  crRNA array
  misc_feature (148)..(157): n is a, c, g, or t
cttggctttatatatcttgtggaaaggacgaaacaccgtaatttctactaagtgtagatttatgtcgcgccgcgacccgtaatttctactaagtgtagattatcgaacgctatcgaacgttaatttctactaagtgtagatttttttnnnnnnnnnnaagcttggcgtggatccgatatcaactagatcttgagacaaatggcagtattcatccacaattttaaaagaaaaggggggattggggggtacagtgcaggggaaagaatagtagacataatagcaacagacatacaaactaaag

SEQ ID NO: 20462 - DNA, 301 bp, Artificial Sequence
  NTC.2_NTC.9
  crRNA array
  misc_feature (148)..(157): n is a, c, g, or t
cttggctttatatatcttgtggaaaggacgaaacaccgtaatttctactaagtgtagatttatgtcgcgccgcgacccgtaatttctactaagtgtagatatcgccgtacggctatggcataatttctactaagtgtagatttttttnnnnnnnnnnaagcttggcgtggatccgatatcaactagatcttgagacaaatggcagtattcatccacaattttaaaagaaaaggggggattggggggtacagtgcaggggaaagaatagtagacataatagcaacagacatacaaactaaag

SEQ ID NO: 20463 - DNA, 301 bp, Artificial Sequence
  NTC.2_NTC.30
  crRNA array
  misc_feature (148)..(157): n is a, c, g, or t
cttggctttatatatcttgtggaaaggacgaaacaccgtaatttctactaagtgtagatttatgtcgcgccgcgacccgtaatttctactaagtgtagatcgatcgtacgggtgtcctaataatttctactaagtgtagatttttttnnnnnnnnnnaagcttggcgtggatccgatatcaactagatcttgagacaaatggcagtattcatccacaattttaaaagaaaaggggggattggggggtacagtgcaggggaaagaatagtagacataatagcaacagacatacaaactaaag

SEQ ID NO: 20464 - DNA, 301 bp, Artificial Sequence
  NTC.2_NTC.8
  crRNA array
  misc_feature (148)..(157): n is a, c, g, or t
cttggctttatatatcttgtggaaaggacgaaacaccgtaatttctactaagtgtagatttatgtcgcgccgcgacccgtaatttctactaagtgtagatcgaccgaggttacgctgggataatttctactaagtgtagatttttttnnnnnnnnnnaagcttggcgtggatccgatatcaactagatcttgagacaaatggcagtattcatccacaattttaaaagaaaaggggggattggggggtacagtgcaggggaaagaatagtagacataatagcaacagacatacaaactaaag

SEQ ID NO: 20465 - DNA, 301 bp, Artificial Sequence
  NTC.2_NTC.46
  crRNA array
  misc_feature (148)..(157): n is a, c, g, or t
cttggctttatatatcttgtggaaaggacgaaacaccgtaatttctactaagtgtagatttatgtcgcgccgcgacccgtaatttctactaagtgtagatagcgggtcgtagacgcgcggtaatttctactaagtgtagatttttttnnnnnnnnnnaagcttggcgtggatccgatatcaactagatcttgagacaaatggcagtattcatccacaattttaaaagaaaaggggggattggggggtacagtgcaggggaaagaatagtagacataatagcaacagacatacaaactaaag

SEQ ID NO: 20466 - DNA, 301 bp, Artificial Sequence
  NTC.2_NTC.35
  crRNA array
  misc_feature (148)..(157): n is a, c, g, or t
cttggctttatatatcttgtggaaaggacgaaacaccgtaatttctactaagtgtagatttatgtcgcgccgcgacccgtaatttctactaagtgtagattggcgcgtaatcgctattcgtaatttctactaagtgtagatttttttnnnnnnnnnnaagcttggcgtggatccgatatcaactagatcttgagacaaatggcagtattcatccacaattttaaaagaaaaggggggattggggggtacagtgcaggggaaagaatagtagacataatagcaacagacatacaaactaaag

SEQ ID NO: 20467 - DNA, 301 bp, Artificial Sequence
  NTC.2_NTC.10
  crRNA array
  misc_feature (148)..(157): n is a, c, g, or t
cttggctttatatatcttgtggaaaggacgaaacaccgtaatttctactaagtgtagatttatgtcgcgccgcgacccgtaatttctactaagtgtagatcgctaagttcgcgcgggccgtaatttctactaagtgtagatttttttnnnnnnnnnnaagcttggcgtggatccgatatcaactagatcttgagacaaatggcagtattcatccacaattttaaaagaaaaggggggattggggggtacagtgcaggggaaagaatagtagacataatagcaacagacatacaaactaaag

SEQ ID NO: 20468 - DNA, 301 bp, Artificial Sequence
  NTC.2_NTC.11
  crRNA array
  misc_feature (148)..(157): n is a, c, g, or t
cttggctttatatatcttgtggaaaggacgaaacaccgtaatttctactaagtgtagatttatgtcgcgccgcgacccgtaatttctactaagtgtagatcgttcgtcgacgaagcaatctaatttctactaagtgtagatttttttnnnnnnnnnnaagcttggcgtggatccgatatcaactagatcttgagacaaatggcagtattcatccacaattttaaaagaaaaggggggattggggggtacagtgcaggggaaagaatagtagacataatagcaacagacatacaaactaaag

SEQ ID NO: 20469 - DNA, 301 bp, Artificial Sequence
  NTC.2_NTC.14
  crRNA array
  misc_feature (148)..(157): n is a, c, g, or t
cttggctttatatatcttgtggaaaggacgaaacaccgtaatttctactaagtgtagatttatgtcgcgccgcgacccgtaatttctactaagtgtagatccgttcgtgcgatagtgttttaatttctactaagtgtagatttttttnnnnnnnnnnaagcttggcgtggatccgatatcaactagatcttgagacaaatggcagtattcatccacaattttaaaagaaaaggggggattggggggtacagtgcaggggaaagaatagtagacataatagcaacagacatacaaactaaag

SEQ ID NO: 20470 - DNA, 301 bp, Artificial Sequence
  NTC.2_NTC.28
  crRNA array
  misc_feature (148)..(157): n is a, c, g, or t
cttggctttatatatcttgtggaaaggacgaaacaccgtaatttctactaagtgtagatttatgtcgcgccgcgacccgtaatttctactaagtgtagataccgctaatcggcgtaaacttaatttctactaagtgtagatttttttnnnnnnnnnnaagcttggcgtggatccgatatcaactagatcttgagacaaatggcagtattcatccacaattttaaaagaaaaggggggattggggggtacagtgcaggggaaagaatagtagacataatagcaacagacatacaaactaaag

SEQ ID NO: 20471 - DNA, 301 bp, Artificial Sequence
  NTC.0_NTC.21
  crRNA array
  misc_feature (148)..(157): n is a, c, g, or t
cttggctttatatatcttgtggaaaggacgaaacaccgtaatttctactaagtgtagattatagcgtcgcgcgctaatttaatttctactaagtgtagatgtataacttcgcgcggtccgtaatttctactaagtgtagatttttttnnnnnnnnnnaagcttggcgtggatccgatatcaactagatcttgagacaaatggcagtattcatccacaattttaaaagaaaaggggggattggggggtacagtgcaggggaaagaatagtagacataatagcaacagacatacaaactaaag

SEQ ID NO: 20472 - DNA, 301 bp, Artificial Sequence
  NTC.0_NTC.43
  crRNA array
  misc_feature (148)..(157): n is a, c, g, or t
cttggctttatatatcttgtggaaaggacgaaacaccgtaatttctactaagtgtagattatagcgtcgcgcgctaatttaatttctactaagtgtagatcgactcgcgcattgaactggtaatttctactaagtgtagatttttttnnnnnnnnnnaagcttggcgtggatccgatatcaactagatcttgagacaaatggcagtattcatccacaattttaaaagaaaaggggggattggggggtacagtgcaggggaaagaatagtagacataatagcaacagacatacaaactaaag

SEQ ID NO: 20473 - DNA, 301 bp, Artificial Sequence
  NTC.0_NTC.44
  crRNA array
  misc_feature (148)..(157): n is a, c, g, or t
cttggctttatatatcttgtggaaaggacgaaacaccgtaatttctactaagtgtagattatagcgtcgcgcgctaatttaatttctactaagtgtagatagcgtcgtacgatttatcgttaatttctactaagtgtagatttttttnnnnnnnnnnaagcttggcgtggatccgatatcaactagatcttgagacaaatggcagtattcatccacaattttaaaagaaaaggggggattggggggtacagtgcaggggaaagaatagtagacataatagcaacagacatacaaactaaag

SEQ ID NO: 20474 - DNA, 301 bp, Artificial Sequence
  NTC.0_NTC.37
  crRNA array
  misc_feature (148)..(157): n is a, c, g, or t
cttggctttatatatcttgtggaaaggacgaaacaccgtaatttctactaagtgtagattatagcgtcgcgcgctaatttaatttctactaagtgtagattttgcgttgacgcgattacttaatttctactaagtgtagatttttttnnnnnnnnnnaagcttggcgtggatccgatatcaactagatcttgagacaaatggcagtattcatccacaattttaaaagaaaaggggggattggggggtacagtgcaggggaaagaatagtagacataatagcaacagacatacaaactaaag

SEQ ID NO: 20475 - DNA, 301 bp, Artificial Sequence
  NTC.0_NTC.7
  crRNA array
  misc_feature (148)..(157): n is a, c, g, or t
cttggctttatatatcttgtggaaaggacgaaacaccgtaatttctactaagtgtagattatagcgtcgcgcgctaatttaatttctactaagtgtagatcgccgaacggataagactattaatttctactaagtgtagatttttttnnnnnnnnnnaagcttggcgtggatccgatatcaactagatcttgagacaaatggcagtattcatccacaattttaaaagaaaaggggggattggggggtacagtgcaggggaaagaatagtagacataatagcaacagacatacaaactaaag

SEQ ID NO: 20476 - DNA, 301 bp, Artificial Sequence
  NTC.0_NTC.49
  crRNA array
  misc_feature (148)..(157): n is a, c, g, or t
cttggctttatatatcttgtggaaaggacgaaacaccgtaatttctactaagtgtagattatagcgtcgcgcgctaatttaatttctactaagtgtagattcggggcgcgtcaactgaattaatttctactaagtgtagatttttttnnnnnnnnnnaagcttggcgtggatccgatatcaactagatcttgagacaaatggcagtattcatccacaattttaaaagaaaaggggggattggggggtacagtgcaggggaaagaatagtagacataatagcaacagacatacaaactaaag

SEQ ID NO: 20477 - DNA, 301 bp, Artificial Sequence
  NTC.0_NTC.50
  crRNA array
  misc_feature (148)..(157): n is a, c, g, or t
cttggctttatatatcttgtggaaaggacgaaacaccgtaatttctactaagtgtagattatagcgtcgcgcgctaatttaatttctactaagtgtagatattgccgctcgcgcaaaatctaatttctactaagtgtagatttttttnnnnnnnnnnaagcttggcgtggatccgatatcaactagatcttgagacaaatggcagtattcatccacaattttaaaagaaaaggggggattggggggtacagtgcaggggaaagaatagtagacataatagcaacagacatacaaactaaag

SEQ ID NO: 20478 - DNA, 301 bp, Artificial Sequence
  NTC.0_NTC.39
  crRNA array
  misc_feature (148)..(157): n is a, c, g, or t
cttggctttatatatcttgtggaaaggacgaaacaccgtaatttctactaagtgtagattatagcgtcgcgcgctaatttaatttctactaagtgtagatccggacgttataacgtttcttaatttctactaagtgtagatttttttnnnnnnnnnnaagcttggcgtggatccgatatcaactagatcttgagacaaatggcagtattcatccacaattttaaaagaaaaggggggattggggggtacagtgcaggggaaagaatagtagacataatagcaacagacatacaaactaaag

SEQ ID NO: 20479 - DNA, 301 bp, Artificial Sequence
  NTC.0_NTC.29
  crRNA array
  misc_feature (148)..(157): n is a, c, g, or t
cttggctttatatatcttgtggaaaggacgaaacaccgtaatttctactaagtgtagattatagcgtcgcgcgctaatttaatttctactaagtgtagatcgcgatctataccgtctatataatttctactaagtgtagatttttttnnnnnnnnnnaagcttggcgtggatccgatatcaactagatcttgagacaaatggcagtattcatccacaattttaaaagaaaaggggggattggggggtacagtgcaggggaaagaatagtagacataatagcaacagacatacaaactaaag

SEQ ID NO: 20480 - DNA, 301 bp, Artificial Sequence
  NTC.0_NTC.25
  crRNA array
  misc_feature (148)..(157): n is a, c, g, or t
cttggctttatatatcttgtggaaaggacgaaacaccgtaatttctactaagtgtagattatagcgtcgcgcgctaatttaatttctactaagtgtagattcgcgttatcgtgccgtgcgtaatttctactaagtgtagatttttttnnnnnnnnnnaagcttggcgtggatccgatatcaactagatcttgagacaaatggcagtattcatccacaattttaaaagaaaaggggggattggggggtacagtgcaggggaaagaatagtagacataatagcaacagacatacaaactaaag

SEQ ID NO: 20481 - DNA, 301 bp, Artificial Sequence
  NTC.0_NTC.3
  crRNA array
  misc_feature (148)..(157): n is a, c, g, or t
cttggctttatatatcttgtggaaaggacgaaacaccgtaatttctactaagtgtagattatagcgtcgcgcgctaatttaatttctactaagtgtagattcgacgcgagacgacgtacataatttctactaagtgtagatttttttnnnnnnnnnnaagcttggcgtggatccgatatcaactagatcttgagacaaatggcagtattcatccacaattttaaaagaaaaggggggattggggggtacagtgcaggggaaagaatagtagacataatagcaacagacatacaaactaaag

SEQ ID NO: 20482 - DNA, 301 bp, Artificial Sequence
  NTC.0_NTC.47
  crRNA array
  misc_feature (148)..(157): n is a, c, g, or t
cttggctttatatatcttgtggaaaggacgaaacaccgtaatttctactaagtgtagattatagcgtcgcgcgctaatttaatttctactaagtgtagattctcgtatcgcgattgttaataatttctactaagtgtagatttttttnnnnnnnnnnaagcttggcgtggatccgatatcaactagatcttgagacaaatggcagtattcatccacaattttaaaagaaaaggggggattggggggtacagtgcaggggaaagaatagtagacataatagcaacagacatacaaactaaag

SEQ ID NO: 20483 - DNA, 301 bp, Artificial Sequence
  NTC.0_NTC.32
  crRNA array
  misc_feature (148)..(157): n is a, c, g, or t
cttggctttatatatcttgtggaaaggacgaaacaccgtaatttctactaagtgtagattatagcgtcgcgcgctaatttaatttctactaagtgtagatgcacgttacgcccgggtcactaatttctactaagtgtagatttttttnnnnnnnnnnaagcttggcgtggatccgatatcaactagatcttgagacaaatggcagtattcatccacaattttaaaagaaaaggggggattggggggtacagtgcaggggaaagaatagtagacataatagcaacagacatacaaactaaag

SEQ ID NO: 20484 - DNA, 301 bp, Artificial Sequence
  NTC.0_NTC.40
  crRNA array
  misc_feature (148)..(157): n is a, c, g, or t
cttggctttatatatcttgtggaaaggacgaaacaccgtaatttctactaagtgtagattatagcgtcgcgcgctaatttaatttctactaagtgtagatattcgcgaacccggccggaataatttctactaagtgtagatttttttnnnnnnnnnnaagcttggcgtggatccgatatcaactagatcttgagacaaatggcagtattcatccacaattttaaaagaaaaggggggattggggggtacagtgcaggggaaagaatagtagacataatagcaacagacatacaaactaaag

SEQ ID NO: 20485 - DNA, 301 bp, Artificial Sequence
  NTC.0_NTC.5
  crRNA array
  misc_feature (148)..(157): n is a, c, g, or t
cttggctttatatatcttgtggaaaggacgaaacaccgtaatttctactaagtgtagattatagcgtcgcgcgctaatttaatttctactaagtgtagatgcttacgcgtcgcgaatgtataatttctactaagtgtagatttttttnnnnnnnnnnaagcttggcgtggatccgatatcaactagatcttgagacaaatggcagtattcatccacaattttaaaagaaaaggggggattggggggtacagtgcaggggaaagaatagtagacataatagcaacagacatacaaactaaag

SEQ ID NO: 20486 - DNA, 301 bp, Artificial Sequence
  NTC.0_NTC.33
  crRNA array
  misc_feature (148)..(157): n is a, c, g, or t
cttggctttatatatcttgtggaaaggacgaaacaccgtaatttctactaagtgtagattatagcgtcgcgcgctaatttaatttctactaagtgtagattaagcgaccgacgcattcgctaatttctactaagtgtagatttttttnnnnnnnnnnaagcttggcgtggatccgatatcaactagatcttgagacaaatggcagtattcatccacaattttaaaagaaaaggggggattggggggtacagtgcaggggaaagaatagtagacataatagcaacagacatacaaactaaag

SEQ ID NO: 20487 - DNA, 301 bp, Artificial Sequence
  NTC.0_NTC.1
  crRNA array
  misc_feature (148)..(157): n is a, c, g, or t
cttggctttatatatcttgtggaaaggacgaaacaccgtaatttctactaagtgtagattatagcgtcgcgcgctaatttaatttctactaagtgtagatcgcgtaaccgttccggctcctaatttctactaagtgtagatttttttnnnnnnnnnnaagcttggcgtggatccgatatcaactagatcttgagacaaatggcagtattcatccacaattttaaaagaaaaggggggattggggggtacagtgcaggggaaagaatagtagacataatagcaacagacatacaaactaaag

SEQ ID NO: 20488 - DNA, 301 bp, Artificial Sequence
  NTC.0_NTC.6
  crRNA array
  misc_feature (148)..(157): n is a, c, g, or t
cttggctttatatatcttgtggaaaggacgaaacaccgtaatttctactaagtgtagattatagcgtcgcgcgctaatttaatttctactaagtgtagatcgaatcgcgcctacgggaattaatttctactaagtgtagatttttttnnnnnnnnnnaagcttggcgtggatccgatatcaactagatcttgagacaaatggcagtattcatccacaattttaaaagaaaaggggggattggggggtacagtgcaggggaaagaatagtagacataatagcaacagacatacaaactaaag

SEQ ID NO: 20489 - DNA, 301 bp, Artificial Sequence
  NTC.0_NTC.38
  crRNA array
  misc_feature (148)..(157): n is a, c, g, or t
cttggctttatatatcttgtggaaaggacgaaacaccgtaatttctactaagtgtagattatagcgtcgcgcgctaatttaatttctactaagtgtagataacggagcgcgatactaccataatttctactaagtgtagatttttttnnnnnnnnnnaagcttggcgtggatccgatatcaactagatcttgagacaaatggcagtattcatccacaattttaaaagaaaaggggggattggggggtacagtgcaggggaaagaatagtagacataatagcaacagacatacaaactaaag

SEQ ID NO: 20490 - DNA, 301 bp, Artificial Sequence
  NTC.0_NTC.41
  crRNA array
  misc_feature (148)..(157): n is a, c, g, or t
cttggctttatatatcttgtggaaaggacgaaacaccgtaatttctactaagtgtagattatagcgtcgcgcgctaatttaatttctactaagtgtagatttgatggcgcgacgcgttattaatttctactaagtgtagatttttttnnnnnnnnnnaagcttggcgtggatccgatatcaactagatcttgagacaaatggcagtattcatccacaattttaaaagaaaaggggggattggggggtacagtgcaggggaaagaatagtagacataatagcaacagacatacaaactaaag

SEQ ID NO: 20491 - DNA, 301 bp, Artificial Sequence
  NTC.0_NTC.18
  crRNA array
  misc_feature (148)..(157): n is a, c, g, or t
cttggctttatatatcttgtggaaaggacgaaacaccgtaatttctactaagtgtagattatagcgtcgcgcgctaatttaatttctactaagtgtagattccggttacgaccggcaaaataatttctactaagtgtagatttttttnnnnnnnnnnaagcttggcgtggatccgatatcaactagatcttgagacaaatggcagtattcatccacaattttaaaagaaaaggggggattggggggtacagtgcaggggaaagaatagtagacataatagcaacagacatacaaactaaag

SEQ ID NO: 20492 - DNA, 301 bp, Artificial Sequence
  NTC.0_NTC.24
  crRNA array
  misc_feature (148)..(157): n is a, c, g, or t
cttggctttatatatcttgtggaaaggacgaaacaccgtaatttctactaagtgtagattatagcgtcgcgcgctaatttaatttctactaagtgtagatactatcgacgttcgtcccggtaatttctactaagtgtagatttttttnnnnnnnnnnaagcttggcgtggatccgatatcaactagatcttgagacaaatggcagtattcatccacaattttaaaagaaaaggggggattggggggtacagtgcaggggaaagaatagtagacataatagcaacagacatacaaactaaag

SEQ ID NO: 20493 - DNA, 301 bp, Artificial Sequence
  NTC.0_NTC.31
  crRNA array
  misc_feature (148)..(157): n is a, c, g, or t
cttggctttatatatcttgtggaaaggacgaaacaccgtaatttctactaagtgtagattatagcgtcgcgcgctaatttaatttctactaagtgtagatgccgaccgcgtgattgtaggtaatttctactaagtgtagatttttttnnnnnnnnnnaagcttggcgtggatccgatatcaactagatcttgagacaaatggcagtattcatccacaattttaaaagaaaaggggggattggggggtacagtgcaggggaaagaatagtagacataatagcaacagacatacaaactaaag

SEQ ID NO: 20494 - DNA, 301 bp, Artificial Sequence
  NTC.0_NTC.51
  crRNA array
  misc_feature (148)..(157): n is a, c, g, or t
cttggctttatatatcttgtggaaaggacgaaacaccgtaatttctactaagtgtagattatagcgtcgcgcgctaatttaatttctactaagtgtagattaacgcgcaacacgccaatgtaatttctactaagtgtagatttttttnnnnnnnnnnaagcttggcgtggatccgatatcaactagatcttgagacaaatggcagtattcatccacaattttaaaagaaaaggggggattggggggtacagtgcaggggaaagaatagtagacataatagcaacagacatacaaactaaag

SEQ ID NO: 20495 - DNA, 301 bp, Artificial Sequence
  NTC.0_NTC.23
  crRNA array
  misc_feature (148)..(157): n is a, c, g, or t
cttggctttatatatcttgtggaaaggacgaaacaccgtaatttctactaagtgtagattatagcgtcgcgcgctaatttaatttctactaagtgtagatacgcgctattatcgtaggtgtaatttctactaagtgtagatttttttnnnnnnnnnnaagcttggcgtggatccgatatcaactagatcttgagacaaatggcagtattcatccacaattttaaaagaaaaggggggattggggggtacagtgcaggggaaagaatagtagacataatagcaacagacatacaaactaaag

SEQ ID NO: 20496 - DNA, 301 bp, Artificial Sequence
  NTC.0_NTC.36
  crRNA array
  misc_feature (148)..(157): n is a, c, g, or t
cttggctttatatatcttgtggaaaggacgaaacaccgtaatttctactaagtgtagattatagcgtcgcgcgctaatttaatttctactaagtgtagatcaacccgccgtagcgggccttaatttctactaagtgtagatttttttnnnnnnnnnnaagcttggcgtggatccgatatcaactagatcttgagacaaatggcagtattcatccacaattttaaaagaaaaggggggattggggggtacagtgcaggggaaagaatagtagacataatagcaacagacatacaaactaaag

SEQ ID NO: 20497 - DNA, 301 bp, Artificial Sequence
  NTC.0_NTC.15
  crRNA array
  misc_feature (148)..(157): n is a, c, g, or t
cttggctttatatatcttgtggaaaggacgaaacaccgtaatttctactaagtgtagattatagcgtcgcgcgctaatttaatttctactaagtgtagatgttgtcgtgccgcgaatttataatttctactaagtgtagatttttttnnnnnnnnnnaagcttggcgtggatccgatatcaactagatcttgagacaaatggcagtattcatccacaattttaaaagaaaaggggggattggggggtacagtgcaggggaaagaatagtagacataatagcaacagacatacaaactaaag

SEQ ID NO: 20498 - DNA, 301 bp, Artificial Sequence
  NTC.0_NTC.45
  crRNA array
  misc_feature (148)..(157): n is a, c, g, or t
cttggctttatatatcttgtggaaaggacgaaacaccgtaatttctactaagtgtagattatagcgtcgcgcgctaatttaatttctactaagtgtagatcggaacgcgtgatactagggtaatttctactaagtgtagatttttttnnnnnnnnnnaagcttggcgtggatccgatatcaactagatcttgagacaaatggcagtattcatccacaattttaaaagaaaaggggggattggggggtacagtgcaggggaaagaatagtagacataatagcaacagacatacaaactaaag

SEQ ID NO: 20499 - DNA, 301 bp, Artificial Sequence
  NTC.0_NTC.12
  crRNA array
  misc_feature (148)..(157): n is a, c, g, or t
cttggctttatatatcttgtggaaaggacgaaacaccgtaatttctactaagtgtagattatagcgtcgcgcgctaatttaatttctactaagtgtagatcgccgacgattaatcaatagtaatttctactaagtgtagatttttttnnnnnnnnnnaagcttggcgtggatccgatatcaactagatcttgagacaaatggcagtattcatccacaattttaaaagaaaaggggggattggggggtacagtgcaggggaaagaatagtagacataatagcaacagacatacaaactaaag

SEQ ID NO: 20500 - DNA, 301 bp, Artificial Sequence
  NTC.0_NTC.19
  crRNA array
  misc_feature (148)..(157): n is a, c, g, or t
cttggctttatatatcttgtggaaaggacgaaacaccgtaatttctactaagtgtagattatagcgtcgcgcgctaatttaatttctactaagtgtagatcgtcgtagaacgatacccgataatttctactaagtgtagatttttttnnnnnnnnnnaagcttggcgtggatccgatatcaactagatcttgagacaaatggcagtattcatccacaattttaaaagaaaaggggggattggggggtacagtgcaggggaaagaatagtagacataatagcaacagacatacaaactaaag

SEQ ID NO: 20501 - DNA, 301 bp, Artificial Sequence
  NTC.0_NTC.20
  crRNA array
  misc_feature (148)..(157): n is a, c, g, or t
cttggctttatatatcttgtggaaaggacgaaacaccgtaatttctactaagtgtagattatagcgtcgcgcgctaatttaatttctactaagtgtagatattccggcgcgaccagaagataatttctactaagtgtagatttttttnnnnnnnnnnaagcttggcgtggatccgatatcaactagatcttgagacaaatggcagtattcatccacaattttaaaagaaaaggggggattggggggtacagtgcaggggaaagaatagtagacataatagcaacagacatacaaactaaag

SEQ ID NO: 20502 - DNA, 301 bp, Artificial Sequence
  NTC.0_NTC.48
  crRNA array
  misc_feature (148)..(157): n is a, c, g, or t
cttggctttatatatcttgtggaaaggacgaaacaccgtaatttctactaagtgtagattatagcgtcgcgcgctaatttaatttctactaagtgtagatcggtcgactacggctgttagtaatttctactaagtgtagatttttttnnnnnnnnnnaagcttggcgtggatccgatatcaactagatcttgagacaaatggcagtattcatccacaattttaaaagaaaaggggggattggggggtacagtgcaggggaaagaatagtagacataatagcaacagacatacaaactaaag

SEQ ID NO: 20503 - DNA, 301 bp, Artificial Sequence
  NTC.0_NTC.26
  crRNA array
  misc_feature (148)..(157): n is a, c, g, or t
cttggctttatatatcttgtggaaaggacgaaacaccgtaatttctactaagtgtagattatagcgtcgcgcgctaatttaatttctactaagtgtagatcgcgacggcggttttaacactaatttctactaagtgtagatttttttnnnnnnnnnnaagcttggcgtggatccgatatcaactagatcttgagacaaatggcagtattcatccacaattttaaaagaaaaggggggattggggggtacagtgcaggggaaagaatagtagacataatagcaacagacatacaaactaaag

SEQ ID NO: 20504 - DNA, 301 bp, Artificial Sequence
  NTC.0_NTC.27
  crRNA array
  misc_feature (148)..(157): n is a, c, g, or t
cttggctttatatatcttgtggaaaggacgaaacaccgtaatttctactaagtgtagattatagcgtcgcgcgctaatttaatttctactaagtgtagatgtcgcgttgcgaccggcgcttaatttctactaagtgtagatttttttnnnnnnnnnnaagcttggcgtggatccgatatcaactagatcttgagacaaatggcagtattcatccacaattttaaaagaaaaggggggattggggggtacagtgcaggggaaagaatagtagacataatagcaacagacatacaaactaaag

SEQ ID NO: 20505 - DNA, 301 bp, Artificial Sequence
  NTC.0_NTC.34
  crRNA array
  misc_feature (148)..(157): n is a, c, g, or t
cttggctttatatatcttgtggaaaggacgaaacaccgtaatttctactaagtgtagattatagcgtcgcgcgctaatttaatttctactaagtgtagattagcgttcgacacgtgaaactaatttctactaagtgtagatttttttnnnnnnnnnnaagcttggcgtggatccgatatcaactagatcttgagacaaatggcagtattcatccacaattttaaaagaaaaggggggattggggggtacagtgcaggggaaagaatagtagacataatagcaacagacatacaaactaaag

SEQ ID NO: 20506 - DNA, 301 bp, Artificial Sequence
  NTC.0_NTC.16
  crRNA array
  misc_feature (148)..(157): n is a, c, g, or t
cttggctttatatatcttgtggaaaggacgaaacaccgtaatttctactaagtgtagattatagcgtcgcgcgctaatttaatttctactaagtgtagatcggtacgttagacgaaaatttaatttctactaagtgtagatttttttnnnnnnnnnnaagcttggcgtggatccgatatcaactagatcttgagacaaatggcagtattcatccacaattttaaaagaaaaggggggattggggggtacagtgcaggggaaagaatagtagacataatagcaacagacatacaaactaaag

SEQ ID NO: 20507 - DNA, 301 bp, Artificial Sequence
  NTC.0_NTC.4
  crRNA array
  misc_feature (148)..(157): n is a, c, g, or t
cttggctttatatatcttgtggaaaggacgaaacaccgtaatttctactaagtgtagattatagcgtcgcgcgctaatttaatttctactaagtgtagatatacccgtcgcgaacgtgagtaatttctactaagtgtagatttttttnnnnnnnnnnaagcttggcgtggatccgatatcaactagatcttgagacaaatggcagtattcatccacaattttaaaagaaaaggggggattggggggtacagtgcaggggaaagaatagtagacataatagcaacagacatacaaactaaag

SEQ ID NO: 20508 - DNA, 301 bp, Artificial Sequence
  NTC.0_NTC.42
  crRNA array
  misc_feature (148)..(157): n is a, c, g, or t
cttggctttatatatcttgtggaaaggacgaaacaccgtaatttctactaagtgtagattatagcgtcgcgcgctaatttaatttctactaagtgtagatggtcaaatcgcggcgataactaatttctactaagtgtagatttttttnnnnnnnnnnaagcttggcgtggatccgatatcaactagatcttgagacaaatggcagtattcatccacaattttaaaagaaaaggggggattggggggtacagtgcaggggaaagaatagtagacataatagcaacagacatacaaactaaag

SEQ ID NO: 20509 - DNA, 301 bp, Artificial Sequence
  NTC.0_NTC.22
  crRNA array
  misc_feature (148)..(157): n is a, c, g, or t
cttggctttatatatcttgtggaaaggacgaaacaccgtaatttctactaagtgtagattatagcgtcgcgcgctaatttaatttctactaagtgtagatgcgcgtcaacgtaatgtgcctaatttctactaagtgtagatttttttnnnnnnnnnnaagcttggcgtggatccgatatcaactagatcttgagacaaatggcagtattcatccacaattttaaaagaaaaggggggattggggggtacagtgcaggggaaagaatagtagacataatagcaacagacatacaaactaaag

SEQ ID NO: 20510 - DNA, 301 bp, Artificial Sequence
  NTC.0_NTC.17
  crRNA array
  misc_feature (148)..(157): n is a, c, g, or t
cttggctttatatatcttgtggaaaggacgaaacaccgtaatttctactaagtgtagattatagcgtcgcgcgctaatttaatttctactaagtgtagattatcgaacgctatcgaacgttaatttctactaagtgtagatttttttnnnnnnnnnnaagcttggcgtggatccgatatcaactagatcttgagacaaatggcagtattcatccacaattttaaaagaaaaggggggattggggggtacagtgcaggggaaagaatagtagacataatagcaacagacatacaaactaaag

SEQ ID NO: 20511 - DNA, 301 bp, Artificial Sequence
  NTC.0_NTC.9
  crRNA array
  misc_feature (148)..(157): n is a, c, g, or t
cttggctttatatatcttgtggaaaggacgaaacaccgtaatttctactaagtgtagattatagcgtcgcgcgctaatttaatttctactaagtgtagatatcgccgtacggctatggcataatttctactaagtgtagatttttttnnnnnnnnnnaagcttggcgtggatccgatatcaactagatcttgagacaaatggcagtattcatccacaattttaaaagaaaaggggggattggggggtacagtgcaggggaaagaatagtagacataatagcaacagacatacaaactaaag

SEQ ID NO: 20512 - DNA, 301 bp, Artificial Sequence
  NTC.0_NTC.30
  crRNA array
  misc_feature (148)..(157): n is a, c, g, or t
cttggctttatatatcttgtggaaaggacgaaacaccgtaatttctactaagtgtagattatagcgtcgcgcgctaatttaatttctactaagtgtagatcgatcgtacgggtgtcctaataatttctactaagtgtagatttttttnnnnnnnnnnaagcttggcgtggatccgatatcaactagatcttgagacaaatggcagtattcatccacaattttaaaagaaaaggggggattggggggtacagtgcaggggaaagaatagtagacataatagcaacagacatacaaactaaag

SEQ ID NO: 20513 - DNA, 301 bp, Artificial Sequence
  NTC.0_NTC.8
  crRNA array
  misc_feature (148)..(157): n is a, c, g, or t
cttggctttatatatcttgtggaaaggacgaaacaccgtaatttctactaagtgtagattatagcgtcgcgcgctaatttaatttctactaagtgtagatcgaccgaggttacgctgggataatttctactaagtgtagatttttttnnnnnnnnnnaagcttggcgtggatccgatatcaactagatcttgagacaaatggcagtattcatccacaattttaaaagaaaaggggggattggggggtacagtgcaggggaaagaatagtagacataatagcaacagacatacaaactaaag

SEQ ID NO: 20514 - DNA, 301 bp, Artificial Sequence
  NTC.0_NTC.46
  crRNA array
  misc_feature (148)..(157): n is a, c, g, or t
cttggctttatatatcttgtggaaaggacgaaacaccgtaatttctactaagtgtagattatagcgtcgcgcgctaatttaatttctactaagtgtagatagcgggtcgtagacgcgcggtaatttctactaagtgtagatttttttnnnnnnnnnnaagcttggcgtggatccgatatcaactagatcttgagacaaatggcagtattcatccacaattttaaaagaaaaggggggattggggggtacagtgcaggggaaagaatagtagacataatagcaacagacatacaaactaaag

SEQ ID NO: 20515 - DNA, 301 bp, Artificial Sequence
  NTC.0_NTC.35
  crRNA array
  misc_feature (148)..(157): n is a, c, g, or t
cttggctttatatatcttgtggaaaggacgaaacaccgtaatttctactaagtgtagattatagcgtcgcgcgctaatttaatttctactaagtgtagattggcgcgtaatcgctattcgtaatttctactaagtgtagatttttttnnnnnnnnnnaagcttggcgtggatccgatatcaactagatcttgagacaaatggcagtattcatccacaattttaaaagaaaaggggggattggggggtacagtgcaggggaaagaatagtagacataatagcaacagacatacaaactaaag

SEQ ID NO: 20516 - DNA, 301 bp, Artificial Sequence
  NTC.0_NTC.10
  crRNA array
  misc_feature (148)..(157): n is a, c, g, or t
cttggctttatatatcttgtggaaaggacgaaacaccgtaatttctactaagtgtagattatagcgtcgcgcgctaatttaatttctactaagtgtagatcgctaagttcgcgcgggccgtaatttctactaagtgtagatttttttnnnnnnnnnnaagcttggcgtggatccgatatcaactagatcttgagacaaatggcagtattcatccacaattttaaaagaaaaggggggattggggggtacagtgcaggggaaagaatagtagacataatagcaacagacatacaaactaaag

SEQ ID NO: 20517 - DNA, 301 bp, Artificial Sequence
  NTC.0_NTC.11
  crRNA array
  misc_feature (148)..(157): n is a, c, g, or t
cttggctttatatatcttgtggaaaggacgaaacaccgtaatttctactaagtgtagattatagcgtcgcgcgctaatttaatttctactaagtgtagatcgttcgtcgacgaagcaatctaatttctactaagtgtagatttttttnnnnnnnnnnaagcttggcgtggatccgatatcaactagatcttgagacaaatggcagtattcatccacaattttaaaagaaaaggggggattggggggtacagtgcaggggaaagaatagtagacataatagcaacagacatacaaactaaag

SEQ ID NO: 20518 - DNA, 301 bp, Artificial Sequence
  NTC.0_NTC.14
  crRNA array
  misc_feature (148)..(157): n is a, c, g, or t
cttggctttatatatcttgtggaaaggacgaaacaccgtaatttctactaagtgtagattatagcgtcgcgcgctaatttaatttctactaagtgtagatccgttcgtgcgatagtgttttaatttctactaagtgtagatttttttnnnnnnnnnnaagcttggcgtggatccgatatcaactagatcttgagacaaatggcagtattcatccacaattttaaaagaaaaggggggattggggggtacagtgcaggggaaagaatagtagacataatagcaacagacatacaaactaaag

SEQ ID NO: 20519 - DNA, 301 bp, Artificial Sequence
  NTC.0_NTC.28
  crRNA array
  misc_feature (148)..(157): n is a, c, g, or t
cttggctttatatatcttgtggaaaggacgaaacaccgtaatttctactaagtgtagattatagcgtcgcgcgctaatttaatttctactaagtgtagataccgctaatcggcgtaaacttaatttctactaagtgtagatttttttnnnnnnnnnnaagcttggcgtggatccgatatcaactagatcttgagacaaatggcagtattcatccacaattttaaaagaaaaggggggattggggggtacagtgcaggggaaagaatagtagacataatagcaacagacatacaaactaaag

SEQ ID NO: 20520 - DNA, 301 bp, Artificial Sequence
  NTC.21_NTC.43
  crRNA array
  misc_feature (148)..(157): n is a, c, g, or t
cttggctttatatatcttgtggaaaggacgaaacaccgtaatttctactaagtgtagatgtataacttcgcgcggtccgtaatttctactaagtgtagatcgactcgcgcattgaactggtaatttctactaagtgtagatttttttnnnnnnnnnnaagcttggcgtggatccgatatcaactagatcttgagacaaatggcagtattcatccacaattttaaaagaaaaggggggattggggggtacagtgcaggggaaagaatagtagacataatagcaacagacatacaaactaaag

SEQ ID NO: 20521 - DNA, 301 bp, Artificial Sequence
  NTC.21_NTC.44
  crRNA array
  misc_feature (148)..(157): n is a, c, g, or t
cttggctttatatatcttgtggaaaggacgaaacaccgtaatttctactaagtgtagatgtataacttcgcgcggtccgtaatttctactaagtgtagatagcgtcgtacgatttatcgttaatttctactaagtgtagatttttttnnnnnnnnnnaagcttggcgtggatccgatatcaactagatcttgagacaaatggcagtattcatccacaattttaaaagaaaaggggggattggggggtacagtgcaggggaaagaatagtagacataatagcaacagacatacaaactaaag

SEQ ID NO: 20522 - DNA, 301 bp, Artificial Sequence
  NTC.21_NTC.37
  crRNA array
  misc_feature (148)..(157): n is a, c, g, or t
cttggctttatatatcttgtggaaaggacgaaacaccgtaatttctactaagtgtagatgtataacttcgcgcggtccgtaatttctactaagtgtagattttgcgttgacgcgattacttaatttctactaagtgtagatttttttnnnnnnnnnnaagcttggcgtggatccgatatcaactagatcttgagacaaatggcagtattcatccacaattttaaaagaaaaggggggattggggggtacagtgcaggggaaagaatagtagacataatagcaacagacatacaaactaaag

SEQ ID NO: 20523 - DNA, 301 bp, Artificial Sequence
  NTC.21_NTC.7
  crRNA array
  misc_feature (148)..(157): n is a, c, g, or t
cttggctttatatatcttgtggaaaggacgaaacaccgtaatttctactaagtgtagatgtataacttcgcgcggtccgtaatttctactaagtgtagatcgccgaacggataagactattaatttctactaagtgtagatttttttnnnnnnnnnnaagcttggcgtggatccgatatcaactagatcttgagacaaatggcagtattcatccacaattttaaaagaaaaggggggattggggggtacagtgcaggggaaagaatagtagacataatagcaacagacatacaaactaaag

SEQ ID NO: 20524 - DNA, 301 bp, Artificial Sequence
  NTC.21_NTC.49
  crRNA array
  misc_feature (148)..(157): n is a, c, g, or t
cttggctttatatatcttgtggaaaggacgaaacaccgtaatttctactaagtgtagatgtataacttcgcgcggtccgtaatttctactaagtgtagattcggggcgcgtcaactgaattaatttctactaagtgtagatttttttnnnnnnnnnnaagcttggcgtggatccgatatcaactagatcttgagacaaatggcagtattcatccacaattttaaaagaaaaggggggattggggggtacagtgcaggggaaagaatagtagacataatagcaacagacatacaaactaaag

SEQ ID NO: 20525 - DNA, 301 bp, Artificial Sequence
  NTC.21_NTC.50
  crRNA array
  misc_feature (148)..(157): n is a, c, g, or t
cttggctttatatatcttgtggaaaggacgaaacaccgtaatttctactaagtgtagatgtataacttcgcgcggtccgtaatttctactaagtgtagatattgccgctcgcgcaaaatctaatttctactaagtgtagatttttttnnnnnnnnnnaagcttggcgtggatccgatatcaactagatcttgagacaaatggcagtattcatccacaattttaaaagaaaaggggggattggggggtacagtgcaggggaaagaatagtagacataatagcaacagacatacaaactaaag

SEQ ID NO: 20526 - DNA, 301 bp, Artificial Sequence
  NTC.21_NTC.39
  crRNA array
  misc_feature (148)..(157): n is a, c, g, or t
cttggctttatatatcttgtggaaaggacgaaacaccgtaatttctactaagtgtagatgtataacttcgcgcggtccgtaatttctactaagtgtagatccggacgttataacgtttcttaatttctactaagtgtagatttttttnnnnnnnnnnaagcttggcgtggatccgatatcaactagatcttgagacaaatggcagtattcatccacaattttaaaagaaaaggggggattggggggtacagtgcaggggaaagaatagtagacataatagcaacagacatacaaactaaag

SEQ ID NO: 20527 - DNA, 301 bp, Artificial Sequence
  NTC.21_NTC.29
  crRNA array
  misc_feature (148)..(157): n is a, c, g, or t
cttggctttatatatcttgtggaaaggacgaaacaccgtaatttctactaagtgtagatgtataacttcgcgcggtccgtaatttctactaagtgtagatcgcgatctataccgtctatataatttctactaagtgtagatttttttnnnnnnnnnnaagcttggcgtggatccgatatcaactagatcttgagacaaatggcagtattcatccacaattttaaaagaaaaggggggattggggggtacagtgcaggggaaagaatagtagacataatagcaacagacatacaaactaaag

SEQ ID NO: 20528 - DNA, 301 bp, Artificial Sequence
  NTC.21_NTC.25
  crRNA array
  misc_feature (148)..(157): n is a, c, g, or t
cttggctttatatatcttgtggaaaggacgaaacaccgtaatttctactaagtgtagatgtataacttcgcgcggtccgtaatttctactaagtgtagattcgcgttatcgtgccgtgcgtaatttctactaagtgtagatttttttnnnnnnnnnnaagcttggcgtggatccgatatcaactagatcttgagacaaatggcagtattcatccacaattttaaaagaaaaggggggattggggggtacagtgcaggggaaagaatagtagacataatagcaacagacatacaaactaaag

SEQ ID NO: 20529 - DNA, 301 bp, Artificial Sequence
  NTC.21_NTC.3
  crRNA array
  misc_feature (148)..(157): n is a, c, g, or t
cttggctttatatatcttgtggaaaggacgaaacaccgtaatttctactaagtgtagatgtataacttcgcgcggtccgtaatttctactaagtgtagattcgacgcgagacgacgtacataatttctactaagtgtagatttttttnnnnnnnnnnaagcttggcgtggatccgatatcaactagatcttgagacaaatggcagtattcatccacaattttaaaagaaaaggggggattggggggtacagtgcaggggaaagaatagtagacataatagcaacagacatacaaactaaag

SEQ ID NO: 20530 - DNA, 301 bp, Artificial Sequence
  NTC.21_NTC.47
  crRNA array
  misc_feature (148)..(157): n is a, c, g, or t
cttggctttatatatcttgtggaaaggacgaaacaccgtaatttctactaagtgtagatgtataacttcgcgcggtccgtaatttctactaagtgtagattctcgtatcgcgattgttaataatttctactaagtgtagatttttttnnnnnnnnnnaagcttggcgtggatccgatatcaactagatcttgagacaaatggcagtattcatccacaattttaaaagaaaaggggggattggggggtacagtgcaggggaaagaatagtagacataatagcaacagacatacaaactaaag

SEQ ID NO: 20531 - DNA, 301 bp, Artificial Sequence
  NTC.21_NTC.32
  crRNA array
  misc_feature (148)..(157): n is a, c, g, or t
cttggctttatatatcttgtggaaaggacgaaacaccgtaatttctactaagtgtagatgtataacttcgcgcggtccgtaatttctactaagtgtagatgcacgttacgcccgggtcactaatttctactaagtgtagatttttttnnnnnnnnnnaagcttggcgtggatccgatatcaactagatcttgagacaaatggcagtattcatccacaattttaaaagaaaaggggggattggggggtacagtgcaggggaaagaatagtagacataatagcaacagacatacaaactaaag

SEQ ID NO: 20532 - DNA, 301 bp, Artificial Sequence
  NTC.21_NTC.40
  crRNA array
  misc_feature (148)..(157): n is a, c, g, or t
cttggctttatatatcttgtggaaaggacgaaacaccgtaatttctactaagtgtagatgtataacttcgcgcggtccgtaatttctactaagtgtagatattcgcgaacccggccggaataatttctactaagtgtagatttttttnnnnnnnnnnaagcttggcgtggatccgatatcaactagatcttgagacaaatggcagtattcatccacaattttaaaagaaaaggggggattggggggtacagtgcaggggaaagaatagtagacataatagcaacagacatacaaactaaag

SEQ ID NO: 20533 - DNA, 301 bp, Artificial Sequence
  NTC.21_NTC.5
  crRNA array
  misc_feature (148)..(157): n is a, c, g, or t
cttggctttatatatcttgtggaaaggacgaaacaccgtaatttctactaagtgtagatgtataacttcgcgcggtccgtaatttctactaagtgtagatgcttacgcgtcgcgaatgtataatttctactaagtgtagatttttttnnnnnnnnnnaagcttggcgtggatccgatatcaactagatcttgagacaaatggcagtattcatccacaattttaaaagaaaaggggggattggggggtacagtgcaggggaaagaatagtagacataatagcaacagacatacaaactaaag

SEQ ID NO: 20534 - DNA, 301 bp, Artificial Sequence
  NTC.21_NTC.33
  crRNA array
  misc_feature (148)..(157): n is a, c, g, or t
cttggctttatatatcttgtggaaaggacgaaacaccgtaatttctactaagtgtagatgtataacttcgcgcggtccgtaatttctactaagtgtagattaagcgaccgacgcattcgctaatttctactaagtgtagatttttttnnnnnnnnnnaagcttggcgtggatccgatatcaactagatcttgagacaaatggcagtattcatccacaattttaaaagaaaaggggggattggggggtacagtgcaggggaaagaatagtagacataatagcaacagacatacaaactaaag

SEQ ID NO: 20535 - DNA, 301 bp, Artificial Sequence
  NTC.21_NTC.1
  crRNA array
  misc_feature (148)..(157): n is a, c, g, or t
cttggctttatatatcttgtggaaaggacgaaacaccgtaatttctactaagtgtagatgtataacttcgcgcggtccgtaatttctactaagtgtagatcgcgtaaccgttccggctcctaatttctactaagtgtagatttttttnnnnnnnnnnaagcttggcgtggatccgatatcaactagatcttgagacaaatggcagtattcatccacaattttaaaagaaaaggggggattggggggtacagtgcaggggaaagaatagtagacataatagcaacagacatacaaactaaag

SEQ ID NO: 20536 - DNA, 301 bp, Artificial Sequence
  NTC.21_NTC.6
  crRNA array
  misc_feature (148)..(157): n is a, c, g, or t
cttggctttatatatcttgtggaaaggacgaaacaccgtaatttctactaagtgtagatgtataacttcgcgcggtccgtaatttctactaagtgtagatcgaatcgcgcctacgggaattaatttctactaagtgtagatttttttnnnnnnnnnnaagcttggcgtggatccgatatcaactagatcttgagacaaatggcagtattcatccacaattttaaaagaaaaggggggattggggggtacagtgcaggggaaagaatagtagacataatagcaacagacatacaaactaaag

SEQ ID NO: 20537 - DNA, 301 bp, Artificial Sequence
  NTC.21_NTC.38
  crRNA array
  misc_feature (148)..(157): n is a, c, g, or t
cttggctttatatatcttgtggaaaggacgaaacaccgtaatttctactaagtgtagatgtataacttcgcgcggtccgtaatttctactaagtgtagataacggagcgcgatactaccataatttctactaagtgtagatttttttnnnnnnnnnnaagcttggcgtggatccgatatcaactagatcttgagacaaatggcagtattcatccacaattttaaaagaaaaggggggattggggggtacagtgcaggggaaagaatagtagacataatagcaacagacatacaaactaaag

SEQ ID NO: 20538 - DNA, 301 bp, Artificial Sequence
  NTC.21_NTC.41
  crRNA array
  misc_feature (148)..(157): n is a, c, g, or t
cttggctttatatatcttgtggaaaggacgaaacaccgtaatttctactaagtgtagatgtataacttcgcgcggtccgtaatttctactaagtgtagatttgatggcgcgacgcgttattaatttctactaagtgtagatttttttnnnnnnnnnnaagcttggcgtggatccgatatcaactagatcttgagacaaatggcagtattcatccacaattttaaaagaaaaggggggattggggggtacagtgcaggggaaagaatagtagacataatagcaacagacatacaaactaaag

SEQ ID NO: 20539 - DNA, 301 bp, Artificial Sequence
  NTC.21_NTC.18
  crRNA array
  misc_feature (148)..(157): n is a, c, g, or t
cttggctttatatatcttgtggaaaggacgaaacaccgtaatttctactaagtgtagatgtataacttcgcgcggtccgtaatttctactaagtgtagattccggttacgaccggcaaaataatttctactaagtgtagatttttttnnnnnnnnnnaagcttggcgtggatccgatatcaactagatcttgagacaaatggcagtattcatccacaattttaaaagaaaaggggggattggggggtacagtgcaggggaaagaatagtagacataatagcaacagacatacaaactaaag

SEQ ID NO: 20540 - DNA, 301 bp, Artificial Sequence
  NTC.21_NTC.24
  crRNA array
  misc_feature (148)..(157): n is a, c, g, or t
cttggctttatatatcttgtggaaaggacgaaacaccgtaatttctactaagtgtagatgtataacttcgcgcggtccgtaatttctactaagtgtagatactatcgacgttcgtcccggtaatttctactaagtgtagatttttttnnnnnnnnnnaagcttggcgtggatccgatatcaactagatcttgagacaaatggcagtattcatccacaattttaaaagaaaaggggggattggggggtacagtgcaggggaaagaatagtagacataatagcaacagacatacaaactaaag

SEQ ID NO: 20541 - DNA, 301 bp, Artificial Sequence
  NTC.21_NTC.31
  crRNA array
  misc_feature (148)..(157): n is a, c, g, or t
cttggctttatatatcttgtggaaaggacgaaacaccgtaatttctactaagtgtagatgtataacttcgcgcggtccgtaatttctactaagtgtagatgccgaccgcgtgattgtaggtaatttctactaagtgtagatttttttnnnnnnnnnnaagcttggcgtggatccgatatcaactagatcttgagacaaatggcagtattcatccacaattttaaaagaaaaggggggattggggggtacagtgcaggggaaagaatagtagacataatagcaacagacatacaaactaaag

SEQ ID NO: 20542 - DNA, 301 bp, Artificial Sequence
  NTC.21_NTC.51
  crRNA array
  misc_feature (148)..(157): n is a, c, g, or t
cttggctttatatatcttgtggaaaggacgaaacaccgtaatttctactaagtgtagatgtataacttcgcgcggtccgtaatttctactaagtgtagattaacgcgcaacacgccaatgtaatttctactaagtgtagatttttttnnnnnnnnnnaagcttggcgtggatccgatatcaactagatcttgagacaaatggcagtattcatccacaattttaaaagaaaaggggggattggggggtacagtgcaggggaaagaatagtagacataatagcaacagacatacaaactaaag

SEQ ID NO: 20543 - DNA, 301 bp, Artificial Sequence
  NTC.21_NTC.23
  crRNA array
  misc_feature (148)..(157): n is a, c, g, or t
cttggctttatatatcttgtggaaaggacgaaacaccgtaatttctactaagtgtagatgtataacttcgcgcggtccgtaatttctactaagtgtagatacgcgctattatcgtaggtgtaatttctactaagtgtagatttttttnnnnnnnnnnaagcttggcgtggatccgatatcaactagatcttgagacaaatggcagtattcatccacaattttaaaagaaaaggggggattggggggtacagtgcaggggaaagaatagtagacataatagcaacagacatacaaactaaag

SEQ ID NO: 20544 - DNA, 301 bp, Artificial Sequence
  NTC.21_NTC.36
  crRNA array
  misc_feature (148)..(157): n is a, c, g, or t
cttggctttatatatcttgtggaaaggacgaaacaccgtaatttctactaagtgtagatgtataacttcgcgcggtccgtaatttctactaagtgtagatcaacccgccgtagcgggccttaatttctactaagtgtagatttttttnnnnnnnnnnaagcttggcgtggatccgatatcaactagatcttgagacaaatggcagtattcatccacaattttaaaagaaaaggggggattggggggtacagtgcaggggaaagaatagtagacataatagcaacagacatacaaactaaag

SEQ ID NO: 20545 - DNA, 301 bp, Artificial Sequence
  NTC.21_NTC.15
  crRNA array
  misc_feature (148)..(157): n is a, c, g, or t
cttggctttatatatcttgtggaaaggacgaaacaccgtaatttctactaagtgtagatgtataacttcgcgcggtccgtaatttctactaagtgtagatgttgtcgtgccgcgaatttataatttctactaagtgtagatttttttnnnnnnnnnnaagcttggcgtggatccgatatcaactagatcttgagacaaatggcagtattcatccacaattttaaaagaaaaggggggattggggggtacagtgcaggggaaagaatagtagacataatagcaacagacatacaaactaaag

SEQ ID NO: 20546 - DNA, 301 bp, Artificial Sequence
  NTC.21_NTC.45
  crRNA array
  misc_feature (148)..(157): n is a, c, g, or t
cttggctttatatatcttgtggaaaggacgaaacaccgtaatttctactaagtgtagatgtataacttcgcgcggtccgtaatttctactaagtgtagatcggaacgcgtgatactagggtaatttctactaagtgtagatttttttnnnnnnnnnnaagcttggcgtggatccgatatcaactagatcttgagacaaatggcagtattcatccacaattttaaaagaaaaggggggattggggggtacagtgcaggggaaagaatagtagacataatagcaacagacatacaaactaaag

SEQ ID NO: 20547 - DNA, 301 bp, Artificial Sequence
  NTC.21_NTC.12
  crRNA array
  misc_feature (148)..(157): n is a, c, g, or t
cttggctttatatatcttgtggaaaggacgaaacaccgtaatttctactaagtgtagatgtataacttcgcgcggtccgtaatttctactaagtgtagatcgccgacgattaatcaatagtaatttctactaagtgtagatttttttnnnnnnnnnnaagcttggcgtggatccgatatcaactagatcttgagacaaatggcagtattcatccacaattttaaaagaaaaggggggattggggggtacagtgcaggggaaagaatagtagacataatagcaacagacatacaaactaaag

SEQ ID NO: 20548 - DNA, 301 bp, Artificial Sequence
  NTC.21_NTC.19
  crRNA array
  misc_feature (148)..(157): n is a, c, g, or t
cttggctttatatatcttgtggaaaggacgaaacaccgtaatttctactaagtgtagatgtataacttcgcgcggtccgtaatttctactaagtgtagatcgtcgtagaacgatacccgataatttctactaagtgtagatttttttnnnnnnnnnnaagcttggcgtggatccgatatcaactagatcttgagacaaatggcagtattcatccacaattttaaaagaaaaggggggattggggggtacagtgcaggggaaagaatagtagacataatagcaacagacatacaaactaaag

SEQ ID NO: 20549 - DNA, 301 bp, Artificial Sequence
  NTC.21_NTC.20
  crRNA array
  misc_feature (148)..(157): n is a, c, g, or t
cttggctttatatatcttgtggaaaggacgaaacaccgtaatttctactaagtgtagatgtataacttcgcgcggtccgtaatttctactaagtgtagatattccggcgcgaccagaagataatttctactaagtgtagatttttttnnnnnnnnnnaagcttggcgtggatccgatatcaactagatcttgagacaaatggcagtattcatccacaattttaaaagaaaaggggggattggggggtacagtgcaggggaaagaatagtagacataatagcaacagacatacaaactaaag

SEQ ID NO: 20550 - DNA, 301 bp, Artificial Sequence
  NTC.21_NTC.48
  crRNA array
  misc_feature (148)..(157): n is a, c, g, or t
cttggctttatatatcttgtggaaaggacgaaacaccgtaatttctactaagtgtagatgtataacttcgcgcggtccgtaatttctactaagtgtagatcggtcgactacggctgttagtaatttctactaagtgtagatttttttnnnnnnnnnnaagcttggcgtggatccgatatcaactagatcttgagacaaatggcagtattcatccacaattttaaaagaaaaggggggattggggggtacagtgcaggggaaagaatagtagacataatagcaacagacatacaaactaaag

SEQ ID NO: 20551 - DNA, 301 bp, Artificial Sequence
  NTC.21_NTC.26
  crRNA array
  misc_feature (148)..(157): n is a, c, g, or t
cttggctttatatatcttgtggaaaggacgaaacaccgtaatttctactaagtgtagatgtataacttcgcgcggtccgtaatttctactaagtgtagatcgcgacggcggttttaacactaatttctactaagtgtagatttttttnnnnnnnnnnaagcttggcgtggatccgatatcaactagatcttgagacaaatggcagtattcatccacaattttaaaagaaaaggggggattggggggtacagtgcaggggaaagaatagtagacataatagcaacagacatacaaactaaag

SEQ ID NO: 20552 - DNA, 301 bp, Artificial Sequence
  NTC.21_NTC.27
  crRNA array
  misc_feature (148)..(157): n is a, c, g, or t
cttggctttatatatcttgtggaaaggacgaaacaccgtaatttctactaagtgtagatgtataacttcgcgcggtccgtaatttctactaagtgtagatgtcgcgttgcgaccggcgcttaatttctactaagtgtagatttttttnnnnnnnnnnaagcttggcgtggatccgatatcaactagatcttgagacaaatggcagtattcatccacaattttaaaagaaaaggggggattggggggtacagtgcaggggaaagaatagtagacataatagcaacagacatacaaactaaag

SEQ ID NO: 20553 - DNA, 301 bp, Artificial Sequence
  NTC.21_NTC.34
  crRNA array
  misc_feature (148)..(157): n is a, c, g, or t
cttggctttatatatcttgtggaaaggacgaaacaccgtaatttctactaagtgtagatgtataacttcgcgcggtccgtaatttctactaagtgtagattagcgttcgacacgtgaaactaatttctactaagtgtagatttttttnnnnnnnnnnaagcttggcgtggatccgatatcaactagatcttgagacaaatggcagtattcatccacaattttaaaagaaaaggggggattggggggtacagtgcaggggaaagaatagtagacataatagcaacagacatacaaactaaag

SEQ ID NO: 20554 - DNA, 301 bp, Artificial Sequence
  NTC.21_NTC.16
  crRNA array
  misc_feature (148)..(157): n is a, c, g, or t
cttggctttatatatcttgtggaaaggacgaaacaccgtaatttctactaagtgtagatgtataacttcgcgcggtccgtaatttctactaagtgtagatcggtacgttagacgaaaatttaatttctactaagtgtagatttttttnnnnnnnnnnaagcttggcgtggatccgatatcaactagatcttgagacaaatggcagtattcatccacaattttaaaagaaaaggggggattggggggtacagtgcaggggaaagaatagtagacataatagcaacagacatacaaactaaag

SEQ ID NO: 20555 - DNA, 301 bp, Artificial Sequence
  NTC.21_NTC.4
  crRNA array
  misc_feature (148)..(157): n is a, c, g, or t
cttggctttatatatcttgtggaaaggacgaaacaccgtaatttctactaagtgtagatgtataacttcgcgcggtccgtaatttctactaagtgtagatatacccgtcgcgaacgtgagtaatttctactaagtgtagatttttttnnnnnnnnnnaagcttggcgtggatccgatatcaactagatcttgagacaaatggcagtattcatccacaattttaaaagaaaaggggggattggggggtacagtgcaggggaaagaatagtagacataatagcaacagacatacaaactaaag

SEQ ID NO: 20556 - DNA, 301 bp, Artificial Sequence
  NTC.21_NTC.42
  crRNA array
  misc_feature (148)..(157): n is a, c, g, or t
cttggctttatatatcttgtggaaaggacgaaacaccgtaatttctactaagtgtagatgtataacttcgcgcggtccgtaatttctactaagtgtagatggtcaaatcgcggcgataactaatttctactaagtgtagatttttttnnnnnnnnnnaagcttggcgtggatccgatatcaactagatcttgagacaaatggcagtattcatccacaattttaaaagaaaaggggggattggggggtacagtgcaggggaaagaatagtagacataatagcaacagacatacaaactaaag

SEQ ID NO: 20557 - DNA, 301 bp, Artificial Sequence
  NTC.21_NTC.22
  crRNA array
  misc_feature (148)..(157): n is a, c, g, or t
cttggctttatatatcttgtggaaaggacgaaacaccgtaatttctactaagtgtagatgtataacttcgcgcggtccgtaatttctactaagtgtagatgcgcgtcaacgtaatgtgcctaatttctactaagtgtagatttttttnnnnnnnnnnaagcttggcgtggatccgatatcaactagatcttgagacaaatggcagtattcatccacaattttaaaagaaaaggggggattggggggtacagtgcaggggaaagaatagtagacataatagcaacagacatacaaactaaag

SEQ ID NO: 20558 - DNA, 301 bp, Artificial Sequence
  NTC.21_NTC.17
  crRNA array
  misc_feature (148)..(157): n is a, c, g, or t
cttggctttatatatcttgtggaaaggacgaaacaccgtaatttctactaagtgtagatgtataacttcgcgcggtccgtaatttctactaagtgtagattatcgaacgctatcgaacgttaatttctactaagtgtagatttttttnnnnnnnnnnaagcttggcgtggatccgatatcaactagatcttgagacaaatggcagtattcatccacaattttaaaagaaaaggggggattggggggtacagtgcaggggaaagaatagtagacataatagcaacagacatacaaactaaag

SEQ ID NO: 20559 - DNA, 301 bp, Artificial Sequence
  NTC.21_NTC.9
  crRNA array
  misc_feature (148)..(157): n is a, c, g, or t
cttggctttatatatcttgtggaaaggacgaaacaccgtaatttctactaagtgtagatgtataacttcgcgcggtccgtaatttctactaagtgtagatatcgccgtacggctatggcataatttctactaagtgtagatttttttnnnnnnnnnnaagcttggcgtggatccgatatcaactagatcttgagacaaatggcagtattcatccacaattttaaaagaaaaggggggattggggggtacagtgcaggggaaagaatagtagacataatagcaacagacatacaaactaaag

SEQ ID NO: 20560 - DNA, 301 bp, Artificial Sequence
  NTC.21_NTC.30
  crRNA array
  misc_feature (148)..(157): n is a, c, g, or t
cttggctttatatatcttgtggaaaggacgaaacaccgtaatttctactaagtgtagatgtataacttcgcgcggtccgtaatttctactaagtgtagatcgatcgtacgggtgtcctaataatttctactaagtgtagatttttttnnnnnnnnnnaagcttggcgtggatccgatatcaactagatcttgagacaaatggcagtattcatccacaattttaaaagaaaaggggggattggggggtacagtgcaggggaaagaatagtagacataatagcaacagacatacaaactaaag

SEQ ID NO: 20561 - DNA, 301 bp, Artificial Sequence
  NTC.21_NTC.8
  crRNA array
  misc_feature (148)..(157): n is a, c, g, or t
cttggctttatatatcttgtggaaaggacgaaacaccgtaatttctactaagtgtagatgtataacttcgcgcggtccgtaatttctactaagtgtagatcgaccgaggttacgctgggataatttctactaagtgtagatttttttnnnnnnnnnnaagcttggcgtggatccgatatcaactagatcttgagacaaatggcagtattcatccacaattttaaaagaaaaggggggattggggggtacagtgcaggggaaagaatagtagacataatagcaacagacatacaaactaaag

SEQ ID NO: 20562 - DNA, 301 bp, Artificial Sequence
  NTC.21_NTC.46
  crRNA array
  misc_feature (148)..(157): n is a, c, g, or t
cttggctttatatatcttgtggaaaggacgaaacaccgtaatttctactaagtgtagatgtataacttcgcgcggtccgtaatttctactaagtgtagatagcgggtcgtagacgcgcggtaatttctactaagtgtagatttttttnnnnnnnnnnaagcttggcgtggatccgatatcaactagatcttgagacaaatggcagtattcatccacaattttaaaagaaaaggggggattggggggtacagtgcaggggaaagaatagtagacataatagcaacagacatacaaactaaag

SEQ ID NO: 20563 - DNA, 301 bp, Artificial Sequence
  NTC.21_NTC.35
  crRNA array
  misc_feature (148)..(157): n is a, c, g, or t
cttggctttatatatcttgtggaaaggacgaaacaccgtaatttctactaagtgtagatgtataacttcgcgcggtccgtaatttctactaagtgtagattggcgcgtaatcgctattcgtaatttctactaagtgtagatttttttnnnnnnnnnnaagcttggcgtggatccgatatcaactagatcttgagacaaatggcagtattcatccacaattttaaaagaaaaggggggattggggggtacagtgcaggggaaagaatagtagacataatagcaacagacatacaaactaaag

SEQ ID NO: 20564 - DNA, 301 bp, Artificial Sequence
  NTC.21_NTC.10
  crRNA array
  misc_feature (148)..(157): n is a, c, g, or t
cttggctttatatatcttgtggaaaggacgaaacaccgtaatttctactaagtgtagatgtataacttcgcgcggtccgtaatttctactaagtgtagatcgctaagttcgcgcgggccgtaatttctactaagtgtagatttttttnnnnnnnnnnaagcttggcgtggatccgatatcaactagatcttgagacaaatggcagtattcatccacaattttaaaagaaaaggggggattggggggtacagtgcaggggaaagaatagtagacataatagcaacagacatacaaactaaag

SEQ ID NO: 20565 - DNA, 301 bp, Artificial Sequence
  NTC.21_NTC.11
  crRNA array
  misc_feature (148)..(157): n is a, c, g, or t
cttggctttatatatcttgtggaaaggacgaaacaccgtaatttctactaagtgtagatgtataacttcgcgcggtccgtaatttctactaagtgtagatcgttcgtcgacgaagcaatctaatttctactaagtgtagatttttttnnnnnnnnnnaagcttggcgtggatccgatatcaactagatcttgagacaaatggcagtattcatccacaattttaaaagaaaaggggggattggggggtacagtgcaggggaaagaatagtagacataatagcaacagacatacaaactaaag

SEQ ID NO: 20566 - DNA, 301 bp, Artificial Sequence
  NTC.21_NTC.14
  crRNA array
  misc_feature (148)..(157): n is a, c, g, or t
cttggctttatatatcttgtggaaaggacgaaacaccgtaatttctactaagtgtagatgtataacttcgcgcggtccgtaatttctactaagtgtagatccgttcgtgcgatagtgttttaatttctactaagtgtagatttttttnnnnnnnnnnaagcttggcgtggatccgatatcaactagatcttgagacaaatggcagtattcatccacaattttaaaagaaaaggggggattggggggtacagtgcaggggaaagaatagtagacataatagcaacagacatacaaactaaag

SEQ ID NO: 20567 - DNA, 301 bp, Artificial Sequence
  NTC.21_NTC.28
  crRNA array
  misc_feature (148)..(157): n is a, c, g, or t
cttggctttatatatcttgtggaaaggacgaaacaccgtaatttctactaagtgtagatgtataacttcgcgcggtccgtaatttctactaagtgtagataccgctaatcggcgtaaacttaatttctactaagtgtagatttttttnnnnnnnnnnaagcttggcgtggatccgatatcaactagatcttgagacaaatggcagtattcatccacaattttaaaagaaaaggggggattggggggtacagtgcaggggaaagaatagtagacataatagcaacagacatacaaactaaag

SEQ ID NO: 20568 - DNA, 301 bp, Artificial Sequence
  NTC.43_NTC.44
  crRNA array
  misc_feature (148)..(157): n is a, c, g, or t
cttggctttatatatcttgtggaaaggacgaaacaccgtaatttctactaagtgtagatcgactcgcgcattgaactggtaatttctactaagtgtagatagcgtcgtacgatttatcgttaatttctactaagtgtagatttttttnnnnnnnnnnaagcttggcgtggatccgatatcaactagatcttgagacaaatggcagtattcatccacaattttaaaagaaaaggggggattggggggtacagtgcaggggaaagaatagtagacataatagcaacagacatacaaactaaag

SEQ ID NO: 20569 - DNA, 301 bp, Artificial Sequence
  NTC.43_NTC.37
  crRNA array
  misc_feature (148)..(157): n is a, c, g, or t
cttggctttatatatcttgtggaaaggacgaaacaccgtaatttctactaagtgtagatcgactcgcgcattgaactggtaatttctactaagtgtagattttgcgttgacgcgattacttaatttctactaagtgtagatttttttnnnnnnnnnnaagcttggcgtggatccgatatcaactagatcttgagacaaatggcagtattcatccacaattttaaaagaaaaggggggattggggggtacagtgcaggggaaagaatagtagacataatagcaacagacatacaaactaaag

SEQ ID NO: 20570 - DNA, 301 bp, Artificial Sequence
  NTC.43_NTC.7
  crRNA array
  misc_feature (148)..(157): n is a, c, g, or t
cttggctttatatatcttgtggaaaggacgaaacaccgtaatttctactaagtgtagatcgactcgcgcattgaactggtaatttctactaagtgtagatcgccgaacggataagactattaatttctactaagtgtagatttttttnnnnnnnnnnaagcttggcgtggatccgatatcaactagatcttgagacaaatggcagtattcatccacaattttaaaagaaaaggggggattggggggtacagtgcaggggaaagaatagtagacataatagcaacagacatacaaactaaag

SEQ ID NO: 20571 - DNA, 301 bp, Artificial Sequence
  NTC.43_NTC.49
  crRNA array
  misc_feature (148)..(157): n is a, c, g, or t
cttggctttatatatcttgtggaaaggacgaaacaccgtaatttctactaagtgtagatcgactcgcgcattgaactggtaatttctactaagtgtagattcggggcgcgtcaactgaattaatttctactaagtgtagatttttttnnnnnnnnnnaagcttggcgtggatccgatatcaactagatcttgagacaaatggcagtattcatccacaattttaaaagaaaaggggggattggggggtacagtgcaggggaaagaatagtagacataatagcaacagacatacaaactaaag

SEQ ID NO: 20572 - DNA, 301 bp, Artificial Sequence
  NTC.43_NTC.50
  crRNA array
  misc_feature (148)..(157): n is a, c, g, or t
cttggctttatatatcttgtggaaaggacgaaacaccgtaatttctactaagtgtagatcgactcgcgcattgaactggtaatttctactaagtgtagatattgccgctcgcgcaaaatctaatttctactaagtgtagatttttttnnnnnnnnnnaagcttggcgtggatccgatatcaactagatcttgagacaaatggcagtattcatccacaattttaaaagaaaaggggggattggggggtacagtgcaggggaaagaatagtagacataatagcaacagacatacaaactaaag

SEQ ID NO: 20573 - DNA, 301 bp, Artificial Sequence
  NTC.43_NTC.39
  crRNA array
  misc_feature (148)..(157): n is a, c, g, or t
cttggctttatatatcttgtggaaaggacgaaacaccgtaatttctactaagtgtagatcgactcgcgcattgaactggtaatttctactaagtgtagatccggacgttataacgtttcttaatttctactaagtgtagatttttttnnnnnnnnnnaagcttggcgtggatccgatatcaactagatcttgagacaaatggcagtattcatccacaattttaaaagaaaaggggggattggggggtacagtgcaggggaaagaatagtagacataatagcaacagacatacaaactaaag

SEQ ID NO: 20574 - DNA, 301 bp, Artificial Sequence
  NTC.43_NTC.29
  crRNA array
  misc_feature (148)..(157): n is a, c, g, or t
cttggctttatatatcttgtggaaaggacgaaacaccgtaatttctactaagtgtagatcgactcgcgcattgaactggtaatttctactaagtgtagatcgcgatctataccgtctatataatttctactaagtgtagatttttttnnnnnnnnnnaagcttggcgtggatccgatatcaactagatcttgagacaaatggcagtattcatccacaattttaaaagaaaaggggggattggggggtacagtgcaggggaaagaatagtagacataatagcaacagacatacaaactaaag

SEQ ID NO: 20575 - DNA, 301 bp, Artificial Sequence
  NTC.43_NTC.25
  crRNA array
  misc_feature (148)..(157): n is a, c, g, or t
cttggctttatatatcttgtggaaaggacgaaacaccgtaatttctactaagtgtagatcgactcgcgcattgaactggtaatttctactaagtgtagattcgcgttatcgtgccgtgcgtaatttctactaagtgtagatttttttnnnnnnnnnnaagcttggcgtggatccgatatcaactagatcttgagacaaatggcagtattcatccacaattttaaaagaaaaggggggattggggggtacagtgcaggggaaagaatagtagacataatagcaacagacatacaaactaaag

SEQ ID NO: 20576 - DNA, 301 bp, Artificial Sequence
  NTC.43_NTC.3
  crRNA array
  misc_feature (148)..(157): n is a, c, g, or t
cttggctttatatatcttgtggaaaggacgaaacaccgtaatttctactaagtgtagatcgactcgcgcattgaactggtaatttctactaagtgtagattcgacgcgagacgacgtacataatttctactaagtgtagatttttttnnnnnnnnnnaagcttggcgtggatccgatatcaactagatcttgagacaaatggcagtattcatccacaattttaaaagaaaaggggggattggggggtacagtgcaggggaaagaatagtagacataatagcaacagacatacaaactaaag

SEQ ID NO: 20577 - DNA, 301 bp, Artificial Sequence
  NTC.43_NTC.47
  crRNA array
  misc_feature (148)..(157): n is a, c, g, or t
cttggctttatatatcttgtggaaaggacgaaacaccgtaatttctactaagtgtagatcgactcgcgcattgaactggtaatttctactaagtgtagattctcgtatcgcgattgttaataatttctactaagtgtagatttttttnnnnnnnnnnaagcttggcgtggatccgatatcaactagatcttgagacaaatggcagtattcatccacaattttaaaagaaaaggggggattggggggtacagtgcaggggaaagaatagtagacataatagcaacagacatacaaactaaag

SEQ ID NO: 20578 - DNA, 301 bp, Artificial Sequence
  NTC.43_NTC.32
  crRNA array
  misc_feature (148)..(157): n is a, c, g, or t
cttggctttatatatcttgtggaaaggacgaaacaccgtaatttctactaagtgtagatcgactcgcgcattgaactggtaatttctactaagtgtagatgcacgttacgcccgggtcactaatttctactaagtgtagatttttttnnnnnnnnnnaagcttggcgtggatccgatatcaactagatcttgagacaaatggcagtattcatccacaattttaaaagaaaaggggggattggggggtacagtgcaggggaaagaatagtagacataatagcaacagacatacaaactaaag

SEQ ID NO: 20579 - DNA, 301 bp, Artificial Sequence
  NTC.43_NTC.40
  crRNA array
  misc_feature (148)..(157): n is a, c, g, or t
cttggctttatatatcttgtggaaaggacgaaacaccgtaatttctactaagtgtagatcgactcgcgcattgaactggtaatttctactaagtgtagatattcgcgaacccggccggaataatttctactaagtgtagatttttttnnnnnnnnnnaagcttggcgtggatccgatatcaactagatcttgagacaaatggcagtattcatccacaattttaaaagaaaaggggggattggggggtacagtgcaggggaaagaatagtagacataatagcaacagacatacaaactaaag

SEQ ID NO: 20580 - DNA, 301 bp, Artificial Sequence
  NTC.43_NTC.5
  crRNA array
  misc_feature (148)..(157): n is a, c, g, or t
cttggctttatatatcttgtggaaaggacgaaacaccgtaatttctactaagtgtagatcgactcgcgcattgaactggtaatttctactaagtgtagatgcttacgcgtcgcgaatgtataatttctactaagtgtagatttttttnnnnnnnnnnaagcttggcgtggatccgatatcaactagatcttgagacaaatggcagtattcatccacaattttaaaagaaaaggggggattggggggtacagtgcaggggaaagaatagtagacataatagcaacagacatacaaactaaag

SEQ ID NO: 20581 - DNA, 301 bp, Artificial Sequence
  NTC.43_NTC.33
  crRNA array
  misc_feature (148)..(157): n is a, c, g, or t
cttggctttatatatcttgtggaaaggacgaaacaccgtaatttctactaagtgtagatcgactcgcgcattgaactggtaatttctactaagtgtagattaagcgaccgacgcattcgctaatttctactaagtgtagatttttttnnnnnnnnnnaagcttggcgtggatccgatatcaactagatcttgagacaaatggcagtattcatccacaattttaaaagaaaaggggggattggggggtacagtgcaggggaaagaatagtagacataatagcaacagacatacaaactaaag

SEQ ID NO: 20582 - DNA, 301 bp, Artificial Sequence
  NTC.43_NTC.1
  crRNA array
  misc_feature (148)..(157): n is a, c, g, or t
cttggctttatatatcttgtggaaaggacgaaacaccgtaatttctactaagtgtagatcgactcgcgcattgaactggtaatttctactaagtgtagatcgcgtaaccgttccggctcctaatttctactaagtgtagatttttttnnnnnnnnnnaagcttggcgtggatccgatatcaactagatcttgagacaaatggcagtattcatccacaattttaaaagaaaaggggggattggggggtacagtgcaggggaaagaatagtagacataatagcaacagacatacaaactaaag

SEQ ID NO: 20583 - DNA, 301 bp, Artificial Sequence
  NTC.43_NTC.6
  crRNA array
  misc_feature (148)..(157): n is a, c, g, or t
cttggctttatatatcttgtggaaaggacgaaacaccgtaatttctactaagtgtagatcgactcgcgcattgaactggtaatttctactaagtgtagatcgaatcgcgcctacgggaattaatttctactaagtgtagatttttttnnnnnnnnnnaagcttggcgtggatccgatatcaactagatcttgagacaaatggcagtattcatccacaattttaaaagaaaaggggggattggggggtacagtgcaggggaaagaatagtagacataatagcaacagacatacaaactaaag

SEQ ID NO: 20584 - DNA, 301 bp, Artificial Sequence
  NTC.43_NTC.38
  crRNA array
  misc_feature (148)..(157): n is a, c, g, or t
cttggctttatatatcttgtggaaaggacgaaacaccgtaatttctactaagtgtagatcgactcgcgcattgaactggtaatttctactaagtgtagataacggagcgcgatactaccataatttctactaagtgtagatttttttnnnnnnnnnnaagcttggcgtggatccgatatcaactagatcttgagacaaatggcagtattcatccacaattttaaaagaaaaggggggattggggggtacagtgcaggggaaagaatagtagacataatagcaacagacatacaaactaaag

SEQ ID NO: 20585 - DNA, 301 bp, Artificial Sequence
  NTC.43_NTC.41
  crRNA array
  misc_feature (148)..(157): n is a, c, g, or t
cttggctttatatatcttgtggaaaggacgaaacaccgtaatttctactaagtgtagatcgactcgcgcattgaactggtaatttctactaagtgtagatttgatggcgcgacgcgttattaatttctactaagtgtagatttttttnnnnnnnnnnaagcttggcgtggatccgatatcaactagatcttgagacaaatggcagtattcatccacaattttaaaagaaaaggggggattggggggtacagtgcaggggaaagaatagtagacataatagcaacagacatacaaactaaag

SEQ ID NO: 20586 - DNA, 301 bp, Artificial Sequence
  NTC.43_NTC.18
  crRNA array
  misc_feature (148)..(157): n is a, c, g, or t
cttggctttatatatcttgtggaaaggacgaaacaccgtaatttctactaagtgtagatcgactcgcgcattgaactggtaatttctactaagtgtagattccggttacgaccggcaaaataatttctactaagtgtagatttttttnnnnnnnnnnaagcttggcgtggatccgatatcaactagatcttgagacaaatggcagtattcatccacaattttaaaagaaaaggggggattggggggtacagtgcaggggaaagaatagtagacataatagcaacagacatacaaactaaag

SEQ ID NO: 20587 - DNA, 301 bp, Artificial Sequence
  NTC.43_NTC.24
  crRNA array
  misc_feature (148)..(157): n is a, c, g, or t
cttggctttatatatcttgtggaaaggacgaaacaccgtaatttctactaagtgtagatcgactcgcgcattgaactggtaatttctactaagtgtagatactatcgacgttcgtcccggtaatttctactaagtgtagatttttttnnnnnnnnnnaagcttggcgtggatccgatatcaactagatcttgagacaaatggcagtattcatccacaattttaaaagaaaaggggggattggggggtacagtgcaggggaaagaatagtagacataatagcaacagacatacaaactaaag

SEQ ID NO: 20588 - DNA, 301 bp, Artificial Sequence
  NTC.43_NTC.31
  crRNA array
  misc_feature (148)..(157): n is a, c, g, or t
cttggctttatatatcttgtggaaaggacgaaacaccgtaatttctactaagtgtagatcgactcgcgcattgaactggtaatttctactaagtgtagatgccgaccgcgtgattgtaggtaatttctactaagtgtagatttttttnnnnnnnnnnaagcttggcgtggatccgatatcaactagatcttgagacaaatggcagtattcatccacaattttaaaagaaaaggggggattggggggtacagtgcaggggaaagaatagtagacataatagcaacagacatacaaactaaag

SEQ ID NO: 20589 - DNA, 301 bp, Artificial Sequence
  NTC.43_NTC.51
  crRNA array
  misc_feature (148)..(157): n is a, c, g, or t
cttggctttatatatcttgtggaaaggacgaaacaccgtaatttctactaagtgtagatcgactcgcgcattgaactggtaatttctactaagtgtagattaacgcgcaacacgccaatgtaatttctactaagtgtagatttttttnnnnnnnnnnaagcttggcgtggatccgatatcaactagatcttgagacaaatggcagtattcatccacaattttaaaagaaaaggggggattggggggtacagtgcaggggaaagaatagtagacataatagcaacagacatacaaactaaag

SEQ ID NO: 20590 - DNA, 301 bp, Artificial Sequence
  NTC.43_NTC.23
  crRNA array
  misc_feature (148)..(157): n is a, c, g, or t
cttggctttatatatcttgtggaaaggacgaaacaccgtaatttctactaagtgtagatcgactcgcgcattgaactggtaatttctactaagtgtagatacgcgctattatcgtaggtgtaatttctactaagtgtagatttttttnnnnnnnnnnaagcttggcgtggatccgatatcaactagatcttgagacaaatggcagtattcatccacaattttaaaagaaaaggggggattggggggtacagtgcaggggaaagaatagtagacataatagcaacagacatacaaactaaag

SEQ ID NO: 20591 - DNA, 301 bp, Artificial Sequence
  NTC.43_NTC.36
  crRNA array
  misc_feature (148)..(157): n is a, c, g, or t
cttggctttatatatcttgtggaaaggacgaaacaccgtaatttctactaagtgtagatcgactcgcgcattgaactggtaatttctactaagtgtagatcaacccgccgtagcgggccttaatttctactaagtgtagatttttttnnnnnnnnnnaagcttggcgtggatccgatatcaactagatcttgagacaaatggcagtattcatccacaattttaaaagaaaaggggggattggggggtacagtgcaggggaaagaatagtagacataatagcaacagacatacaaactaaag

SEQ ID NO: 20592 - DNA, 301 bp, Artificial Sequence
  NTC.43_NTC.15
  crRNA array
  misc_feature (148)..(157): n is a, c, g, or t
cttggctttatatatcttgtggaaaggacgaaacaccgtaatttctactaagtgtagatcgactcgcgcattgaactggtaatttctactaagtgtagatgttgtcgtgccgcgaatttataatttctactaagtgtagatttttttnnnnnnnnnnaagcttggcgtggatccgatatcaactagatcttgagacaaatggcagtattcatccacaattttaaaagaaaaggggggattggggggtacagtgcaggggaaagaatagtagacataatagcaacagacatacaaactaaag

SEQ ID NO: 20593 - DNA, 301 bp, Artificial Sequence
  NTC.43_NTC.45
  crRNA array
  misc_feature (148)..(157): n is a, c, g, or t
cttggctttatatatcttgtggaaaggacgaaacaccgtaatttctactaagtgtagatcgactcgcgcattgaactggtaatttctactaagtgtagatcggaacgcgtgatactagggtaatttctactaagtgtagatttttttnnnnnnnnnnaagcttggcgtggatccgatatcaactagatcttgagacaaatggcagtattcatccacaattttaaaagaaaaggggggattggggggtacagtgcaggggaaagaatagtagacataatagcaacagacatacaaactaaag

SEQ ID NO: 20594 - DNA, 301 bp, Artificial Sequence
  NTC.43_NTC.12
  crRNA array
  misc_feature (148)..(157): n is a, c, g, or t
cttggctttatatatcttgtggaaaggacgaaacaccgtaatttctactaagtgtagatcgactcgcgcattgaactggtaatttctactaagtgtagatcgccgacgattaatcaatagtaatttctactaagtgtagatttttttnnnnnnnnnnaagcttggcgtggatccgatatcaactagatcttgagacaaatggcagtattcatccacaattttaaaagaaaaggggggattggggggtacagtgcaggggaaagaatagtagacataatagcaacagacatacaaactaaag

SEQ ID NO: 20595 - DNA, 301 bp, Artificial Sequence
  NTC.43_NTC.19
  crRNA array
  misc_feature (148)..(157): n is a, c, g, or t
cttggctttatatatcttgtggaaaggacgaaacaccgtaatttctactaagtgtagatcgactcgcgcattgaactggtaatttctactaagtgtagatcgtcgtagaacgatacccgataatttctactaagtgtagatttttttnnnnnnnnnnaagcttggcgtggatccgatatcaactagatcttgagacaaatggcagtattcatccacaattttaaaagaaaaggggggattggggggtacagtgcaggggaaagaatagtagacataatagcaacagacatacaaactaaag

SEQ ID NO: 20596 - DNA, 301 bp, Artificial Sequence
  NTC.43_NTC.20
  crRNA array
  misc_feature (148)..(157): n is a, c, g, or t
cttggctttatatatcttgtggaaaggacgaaacaccgtaatttctactaagtgtagatcgactcgcgcattgaactggtaatttctactaagtgtagatattccggcgcgaccagaagataatttctactaagtgtagatttttttnnnnnnnnnnaagcttggcgtggatccgatatcaactagatcttgagacaaatggcagtattcatccacaattttaaaagaaaaggggggattggggggtacagtgcaggggaaagaatagtagacataatagcaacagacatacaaactaaag

SEQ ID NO: 20597 - DNA, 301 bp, Artificial Sequence
  NTC.43_NTC.48
  crRNA array
  misc_feature (148)..(157): n is a, c, g, or t
cttggctttatatatcttgtggaaaggacgaaacaccgtaatttctactaagtgtagatcgactcgcgcattgaactggtaatttctactaagtgtagatcggtcgactacggctgttagtaatttctactaagtgtagatttttttnnnnnnnnnnaagcttggcgtggatccgatatcaactagatcttgagacaaatggcagtattcatccacaattttaaaagaaaaggggggattggggggtacagtgcaggggaaagaatagtagacataatagcaacagacatacaaactaaag

SEQ ID NO: 20598 - DNA, 301 bp, Artificial Sequence
  NTC.43_NTC.26
  crRNA array
  misc_feature (148)..(157): n is a, c, g, or t
cttggctttatatatcttgtggaaaggacgaaacaccgtaatttctactaagtgtagatcgactcgcgcattgaactggtaatttctactaagtgtagatcgcgacggcggttttaacactaatttctactaagtgtagatttttttnnnnnnnnnnaagcttggcgtggatccgatatcaactagatcttgagacaaatggcagtattcatccacaattttaaaagaaaaggggggattggggggtacagtgcaggggaaagaatagtagacataatagcaacagacatacaaactaaag

SEQ ID NO: 20599 - DNA, 301 bp, Artificial Sequence
  NTC.43_NTC.27
  crRNA array
  misc_feature (148)..(157): n is a, c, g, or t
cttggctttatatatcttgtggaaaggacgaaacaccgtaatttctactaagtgtagatcgactcgcgcattgaactggtaatttctactaagtgtagatgtcgcgttgcgaccggcgcttaatttctactaagtgtagatttttttnnnnnnnnnnaagcttggcgtggatccgatatcaactagatcttgagacaaatggcagtattcatccacaattttaaaagaaaaggggggattggggggtacagtgcaggggaaagaatagtagacataatagcaacagacatacaaactaaag

SEQ ID NO: 20600 - DNA, 301 bp, Artificial Sequence
  NTC.43_NTC.34
  crRNA array
  misc_feature (148)..(157): n is a, c, g, or t
cttggctttatatatcttgtggaaaggacgaaacaccgtaatttctactaagtgtagatcgactcgcgcattgaactggtaatttctactaagtgtagattagcgttcgacacgtgaaactaatttctactaagtgtagatttttttnnnnnnnnnnaagcttggcgtggatccgatatcaactagatcttgagacaaatggcagtattcatccacaattttaaaagaaaaggggggattggggggtacagtgcaggggaaagaatagtagacataatagcaacagacatacaaactaaag

SEQ ID NO: 20601 - DNA, 301 bp, Artificial Sequence
  NTC.43_NTC.16
  crRNA array
  misc_feature (148)..(157): n is a, c, g, or t
cttggctttatatatcttgtggaaaggacgaaacaccgtaatttctactaagtgtagatcgactcgcgcattgaactggtaatttctactaagtgtagatcggtacgttagacgaaaatttaatttctactaagtgtagatttttttnnnnnnnnnnaagcttggcgtggatccgatatcaactagatcttgagacaaatggcagtattcatccacaattttaaaagaaaaggggggattggggggtacagtgcaggggaaagaatagtagacataatagcaacagacatacaaactaaag

SEQ ID NO: 20602 - DNA, 301 bp, Artificial Sequence
  NTC.43_NTC.4
  crRNA array
  misc_feature (148)..(157): n is a, c, g, or t
cttggctttatatatcttgtggaaaggacgaaacaccgtaatttctactaagtgtagatcgactcgcgcattgaactggtaatttctactaagtgtagatatacccgtcgcgaacgtgagtaatttctactaagtgtagatttttttnnnnnnnnnnaagcttggcgtggatccgatatcaactagatcttgagacaaatggcagtattcatccacaattttaaaagaaaaggggggattggggggtacagtgcaggggaaagaatagtagacataatagcaacagacatacaaactaaag

SEQ ID NO: 20603 - DNA, 301 bp, Artificial Sequence
  NTC.43_NTC.42
  crRNA array
  misc_feature (148)..(157): n is a, c, g, or t
cttggctttatatatcttgtggaaaggacgaaacaccgtaatttctactaagtgtagatcgactcgcgcattgaactggtaatttctactaagtgtagatggtcaaatcgcggcgataactaatttctactaagtgtagatttttttnnnnnnnnnnaagcttggcgtggatccgatatcaactagatcttgagacaaatggcagtattcatccacaattttaaaagaaaaggggggattggggggtacagtgcaggggaaagaatagtagacataatagcaacagacatacaaactaaag

SEQ ID NO: 20604 - DNA, 301 bp, Artificial Sequence
  NTC.43_NTC.22
  crRNA array
  misc_feature (148)..(157): n is a, c, g, or t
cttggctttatatatcttgtggaaaggacgaaacaccgtaatttctactaagtgtagatcgactcgcgcattgaactggtaatttctactaagtgtagatgcgcgtcaacgtaatgtgcctaatttctactaagtgtagatttttttnnnnnnnnnnaagcttggcgtggatccgatatcaactagatcttgagacaaatggcagtattcatccacaattttaaaagaaaaggggggattggggggtacagtgcaggggaaagaatagtagacataatagcaacagacatacaaactaaag

SEQ ID NO: 20605 - DNA, 301 bp, Artificial Sequence
  NTC.43_NTC.17
  crRNA array
  misc_feature (148)..(157): n is a, c, g, or t
cttggctttatatatcttgtggaaaggacgaaacaccgtaatttctactaagtgtagatcgactcgcgcattgaactggtaatttctactaagtgtagattatcgaacgctatcgaacgttaatttctactaagtgtagatttttttnnnnnnnnnnaagcttggcgtggatccgatatcaactagatcttgagacaaatggcagtattcatccacaattttaaaagaaaaggggggattggggggtacagtgcaggggaaagaatagtagacataatagcaacagacatacaaactaaag

SEQ ID NO: 20606 - DNA, 301 bp, Artificial Sequence
  NTC.43_NTC.9
  crRNA array
  misc_feature (148)..(157): n is a, c, g, or t
cttggctttatatatcttgtggaaaggacgaaacaccgtaatttctactaagtgtagatcgactcgcgcattgaactggtaatttctactaagtgtagatatcgccgtacggctatggcataatttctactaagtgtagatttttttnnnnnnnnnnaagcttggcgtggatccgatatcaactagatcttgagacaaatggcagtattcatccacaattttaaaagaaaaggggggattggggggtacagtgcaggggaaagaatagtagacataatagcaacagacatacaaactaaag

SEQ ID NO: 20607 - DNA, 301 bp, Artificial Sequence
  NTC.43_NTC.30
  crRNA array
  misc_feature (148)..(157): n is a, c, g, or t
cttggctttatatatcttgtggaaaggacgaaacaccgtaatttctactaagtgtagatcgactcgcgcattgaactggtaatttctactaagtgtagatcgatcgtacgggtgtcctaataatttctactaagtgtagatttttttnnnnnnnnnnaagcttggcgtggatccgatatcaactagatcttgagacaaatggcagtattcatccacaattttaaaagaaaaggggggattggggggtacagtgcaggggaaagaatagtagacataatagcaacagacatacaaactaaag

SEQ ID NO: 20608 - DNA, 301 bp, Artificial Sequence
  NTC.43_NTC.8
  crRNA array
  misc_feature (148)..(157): n is a, c, g, or t
cttggctttatatatcttgtggaaaggacgaaacaccgtaatttctactaagtgtagatcgactcgcgcattgaactggtaatttctactaagtgtagatcgaccgaggttacgctgggataatttctactaagtgtagatttttttnnnnnnnnnnaagcttggcgtggatccgatatcaactagatcttgagacaaatggcagtattcatccacaattttaaaagaaaaggggggattggggggtacagtgcaggggaaagaatagtagacataatagcaacagacatacaaactaaag

SEQ ID NO: 20609 - DNA, 301 bp, Artificial Sequence
  NTC.43_NTC.46
  crRNA array
  misc_feature (148)..(157): n is a, c, g, or t
cttggctttatatatcttgtggaaaggacgaaacaccgtaatttctactaagtgtagatcgactcgcgcattgaactggtaatttctactaagtgtagatagcgggtcgtagacgcgcggtaatttctactaagtgtagatttttttnnnnnnnnnnaagcttggcgtggatccgatatcaactagatcttgagacaaatggcagtattcatccacaattttaaaagaaaaggggggattggggggtacagtgcaggggaaagaatagtagacataatagcaacagacatacaaactaaag

SEQ ID NO: 20610 - DNA, 301 bp, Artificial Sequence
  NTC.43_NTC.35
  crRNA array
  misc_feature (148)..(157): n is a, c, g, or t
cttggctttatatatcttgtggaaaggacgaaacaccgtaatttctactaagtgtagatcgactcgcgcattgaactggtaatttctactaagtgtagattggcgcgtaatcgctattcgtaatttctactaagtgtagatttttttnnnnnnnnnnaagcttggcgtggatccgatatcaactagatcttgagacaaatggcagtattcatccacaattttaaaagaaaaggggggattggggggtacagtgcaggggaaagaatagtagacataatagcaacagacatacaaactaaag

SEQ ID NO: 20611 - DNA, 301 bp, Artificial Sequence
  NTC.43_NTC.10
  crRNA array
  misc_feature (148)..(157): n is a, c, g, or t
cttggctttatatatcttgtggaaaggacgaaacaccgtaatttctactaagtgtagatcgactcgcgcattgaactggtaatttctactaagtgtagatcgctaagttcgcgcgggccgtaatttctactaagtgtagatttttttnnnnnnnnnnaagcttggcgtggatccgatatcaactagatcttgagacaaatggcagtattcatccacaattttaaaagaaaaggggggattggggggtacagtgcaggggaaagaatagtagacataatagcaacagacatacaaactaaag

SEQ ID NO: 20612 - DNA, 301 bp, Artificial Sequence
  NTC.43_NTC.11
  crRNA array
  misc_feature (148)..(157): n is a, c, g, or t
cttggctttatatatcttgtggaaaggacgaaacaccgtaatttctactaagtgtagatcgactcgcgcattgaactggtaatttctactaagtgtagatcgttcgtcgacgaagcaatctaatttctactaagtgtagatttttttnnnnnnnnnnaagcttggcgtggatccgatatcaactagatcttgagacaaatggcagtattcatccacaattttaaaagaaaaggggggattggggggtacagtgcaggggaaagaatagtagacataatagcaacagacatacaaactaaag

SEQ ID NO: 20613 - DNA, 301 bp, Artificial Sequence
  NTC.43_NTC.14
  crRNA array
  misc_feature (148)..(157): n is a, c, g, or t
cttggctttatatatcttgtggaaaggacgaaacaccgtaatttctactaagtgtagatcgactcgcgcattgaactggtaatttctactaagtgtagatccgttcgtgcgatagtgttttaatttctactaagtgtagatttttttnnnnnnnnnnaagcttggcgtggatccgatatcaactagatcttgagacaaatggcagtattcatccacaattttaaaagaaaaggggggattggggggtacagtgcaggggaaagaatagtagacataatagcaacagacatacaaactaaag

SEQ ID NO: 20614 - DNA, 301 bp, Artificial Sequence
  NTC.43_NTC.28
  crRNA array
  misc_feature (148)..(157): n is a, c, g, or t
cttggctttatatatcttgtggaaaggacgaaacaccgtaatttctactaagtgtagatcgactcgcgcattgaactggtaatttctactaagtgtagataccgctaatcggcgtaaacttaatttctactaagtgtagatttttttnnnnnnnnnnaagcttggcgtggatccgatatcaactagatcttgagacaaatggcagtattcatccacaattttaaaagaaaaggggggattggggggtacagtgcaggggaaagaatagtagacataatagcaacagacatacaaactaaag

SEQ ID NO: 20615 - DNA, 301 bp, Artificial Sequence
  NTC.44_NTC.37
  crRNA array
  misc_feature (148)..(157): n is a, c, g, or t
cttggctttatatatcttgtggaaaggacgaaacaccgtaatttctactaagtgtagatagcgtcgtacgatttatcgttaatttctactaagtgtagattttgcgttgacgcgattacttaatttctactaagtgtagatttttttnnnnnnnnnnaagcttggcgtggatccgatatcaactagatcttgagacaaatggcagtattcatccacaattttaaaagaaaaggggggattggggggtacagtgcaggggaaagaatagtagacataatagcaacagacatacaaactaaag

SEQ ID NO: 20616 - DNA, 301 bp, Artificial Sequence
  NTC.44_NTC.7
  crRNA array
  misc_feature (148)..(157): n is a, c, g, or t
cttggctttatatatcttgtggaaaggacgaaacaccgtaatttctactaagtgtagatagcgtcgtacgatttatcgttaatttctactaagtgtagatcgccgaacggataagactattaatttctactaagtgtagatttttttnnnnnnnnnnaagcttggcgtggatccgatatcaactagatcttgagacaaatggcagtattcatccacaattttaaaagaaaaggggggattggggggtacagtgcaggggaaagaatagtagacataatagcaacagacatacaaactaaag

SEQ ID NO: 20617 - DNA, 301 bp, Artificial Sequence
  NTC.44_NTC.49
  crRNA array
  misc_feature (148)..(157): n is a, c, g, or t
cttggctttatatatcttgtggaaaggacgaaacaccgtaatttctactaagtgtagatagcgtcgtacgatttatcgttaatttctactaagtgtagattcggggcgcgtcaactgaattaatttctactaagtgtagatttttttnnnnnnnnnnaagcttggcgtggatccgatatcaactagatcttgagacaaatggcagtattcatccacaattttaaaagaaaaggggggattggggggtacagtgcaggggaaagaatagtagacataatagcaacagacatacaaactaaag

SEQ ID NO: 20618 - DNA, 301 bp, Artificial Sequence
  NTC.44_NTC.50
  crRNA array
  misc_feature (148)..(157): n is a, c, g, or t
cttggctttatatatcttgtggaaaggacgaaacaccgtaatttctactaagtgtagatagcgtcgtacgatttatcgttaatttctactaagtgtagatattgccgctcgcgcaaaatctaatttctactaagtgtagatttttttnnnnnnnnnnaagcttggcgtggatccgatatcaactagatcttgagacaaatggcagtattcatccacaattttaaaagaaaaggggggattggggggtacagtgcaggggaaagaatagtagacataatagcaacagacatacaaactaaag

SEQ ID NO: 20619 - DNA, 301 bp, Artificial Sequence
  NTC.44_NTC.39
  crRNA array
  misc_feature (148)..(157): n is a, c, g, or t
cttggctttatatatcttgtggaaaggacgaaacaccgtaatttctactaagtgtagatagcgtcgtacgatttatcgttaatttctactaagtgtagatccggacgttataacgtttcttaatttctactaagtgtagatttttttnnnnnnnnnnaagcttggcgtggatccgatatcaactagatcttgagacaaatggcagtattcatccacaattttaaaagaaaaggggggattggggggtacagtgcaggggaaagaatagtagacataatagcaacagacatacaaactaaag

SEQ ID NO: 20620 - DNA, 301 bp, Artificial Sequence
  NTC.44_NTC.29
  crRNA array
  misc_feature (148)..(157): n is a, c, g, or t
cttggctttatatatcttgtggaaaggacgaaacaccgtaatttctactaagtgtagatagcgtcgtacgatttatcgttaatttctactaagtgtagatcgcgatctataccgtctatataatttctactaagtgtagatttttttnnnnnnnnnnaagcttggcgtggatccgatatcaactagatcttgagacaaatggcagtattcatccacaattttaaaagaaaaggggggattggggggtacagtgcaggggaaagaatagtagacataatagcaacagacatacaaactaaag

SEQ ID NO: 20621 - DNA, 301 bp, Artificial Sequence
  NTC.44_NTC.25
  crRNA array
  misc_feature (148)..(157): n is a, c, g, or t
cttggctttatatatcttgtggaaaggacgaaacaccgtaatttctactaagtgtagatagcgtcgtacgatttatcgttaatttctactaagtgtagattcgcgttatcgtgccgtgcgtaatttctactaagtgtagatttttttnnnnnnnnnnaagcttggcgtggatccgatatcaactagatcttgagacaaatggcagtattcatccacaattttaaaagaaaaggggggattggggggtacagtgcaggggaaagaatagtagacataatagcaacagacatacaaactaaag

SEQ ID NO: 20622 - DNA, 301 bp, Artificial Sequence
  NTC.44_NTC.3
  crRNA array
  misc_feature (148)..(157): n is a, c, g, or t
cttggctttatatatcttgtggaaaggacgaaacaccgtaatttctactaagtgtagatagcgtcgtacgatttatcgttaatttctactaagtgtagattcgacgcgagacgacgtacataatttctactaagtgtagatttttttnnnnnnnnnnaagcttggcgtggatccgatatcaactagatcttgagacaaatggcagtattcatccacaattttaaaagaaaaggggggattggggggtacagtgcaggggaaagaatagtagacataatagcaacagacatacaaactaaag

SEQ ID NO: 20623 - DNA, 301 bp, Artificial Sequence
  NTC.44_NTC.47
  crRNA array
  misc_feature (148)..(157): n is a, c, g, or t
cttggctttatatatcttgtggaaaggacgaaacaccgtaatttctactaagtgtagatagcgtcgtacgatttatcgttaatttctactaagtgtagattctcgtatcgcgattgttaataatttctactaagtgtagatttttttnnnnnnnnnnaagcttggcgtggatccgatatcaactagatcttgagacaaatggcagtattcatccacaattttaaaagaaaaggggggattggggggtacagtgcaggggaaagaatagtagacataatagcaacagacatacaaactaaag

SEQ ID NO: 20624 - DNA, 301 bp, Artificial Sequence
  NTC.44_NTC.32
  crRNA array
  misc_feature (148)..(157): n is a, c, g, or t
cttggctttatatatcttgtggaaaggacgaaacaccgtaatttctactaagtgtagatagcgtcgtacgatttatcgttaatttctactaagtgtagatgcacgttacgcccgggtcactaatttctactaagtgtagatttttttnnnnnnnnnnaagcttggcgtggatccgatatcaactagatcttgagacaaatggcagtattcatccacaattttaaaagaaaaggggggattggggggtacagtgcaggggaaagaatagtagacataatagcaacagacatacaaactaaag

SEQ ID NO: 20625 - DNA, 301 bp, Artificial Sequence
  NTC.44_NTC.40
  crRNA array
  misc_feature (148)..(157): n is a, c, g, or t
cttggctttatatatcttgtggaaaggacgaaacaccgtaatttctactaagtgtagatagcgtcgtacgatttatcgttaatttctactaagtgtagatattcgcgaacccggccggaataatttctactaagtgtagatttttttnnnnnnnnnnaagcttggcgtggatccgatatcaactagatcttgagacaaatggcagtattcatccacaattttaaaagaaaaggggggattggggggtacagtgcaggggaaagaatagtagacataatagcaacagacatacaaactaaag

SEQ ID NO: 20626 - DNA, 301 bp, Artificial Sequence
  NTC.44_NTC.5
  crRNA array
  misc_feature (148)..(157): n is a, c, g, or t
cttggctttatatatcttgtggaaaggacgaaacaccgtaatttctactaagtgtagatagcgtcgtacgatttatcgttaatttctactaagtgtagatgcttacgcgtcgcgaatgtataatttctactaagtgtagatttttttnnnnnnnnnnaagcttggcgtggatccgatatcaactagatcttgagacaaatggcagtattcatccacaattttaaaagaaaaggggggattggggggtacagtgcaggggaaagaatagtagacataatagcaacagacatacaaactaaag

SEQ ID NO: 20627 - DNA, 301 bp, Artificial Sequence
  NTC.44_NTC.33
  crRNA array
  misc_feature (148)..(157): n is a, c, g, or t
cttggctttatatatcttgtggaaaggacgaaacaccgtaatttctactaagtgtagatagcgtcgtacgatttatcgttaatttctactaagtgtagattaagcgaccgacgcattcgctaatttctactaagtgtagatttttttnnnnnnnnnnaagcttggcgtggatccgatatcaactagatcttgagacaaatggcagtattcatccacaattttaaaagaaaaggggggattggggggtacagtgcaggggaaagaatagtagacataatagcaacagacatacaaactaaag

SEQ ID NO: 20628 - DNA, 301 bp, Artificial Sequence
  NTC.44_NTC.1
  crRNA array
  misc_feature (148)..(157): n is a, c, g, or t
cttggctttatatatcttgtggaaaggacgaaacaccgtaatttctactaagtgtagatagcgtcgtacgatttatcgttaatttctactaagtgtagatcgcgtaaccgttccggctcctaatttctactaagtgtagatttttttnnnnnnnnnnaagcttggcgtggatccgatatcaactagatcttgagacaaatggcagtattcatccacaattttaaaagaaaaggggggattggggggtacagtgcaggggaaagaatagtagacataatagcaacagacatacaaactaaag

SEQ ID NO: 20629 - DNA, 301 bp, Artificial Sequence
  NTC.44_NTC.6
  crRNA array
  misc_feature (148)..(157): n is a, c, g, or t
cttggctttatatatcttgtggaaaggacgaaacaccgtaatttctactaagtgtagatagcgtcgtacgatttatcgttaatttctactaagtgtagatcgaatcgcgcctacgggaattaatttctactaagtgtagatttttttnnnnnnnnnnaagcttggcgtggatccgatatcaactagatcttgagacaaatggcagtattcatccacaattttaaaagaaaaggggggattggggggtacagtgcaggggaaagaatagtagacataatagcaacagacatacaaactaaag

SEQ ID NO: 20630 - DNA, 301 bp, Artificial Sequence
  NTC.44_NTC.38
  crRNA array
  misc_feature (148)..(157): n is a, c, g, or t
cttggctttatatatcttgtggaaaggacgaaacaccgtaatttctactaagtgtagatagcgtcgtacgatttatcgttaatttctactaagtgtagataacggagcgcgatactaccataatttctactaagtgtagatttttttnnnnnnnnnnaagcttggcgtggatccgatatcaactagatcttgagacaaatggcagtattcatccacaattttaaaagaaaaggggggattggggggtacagtgcaggggaaagaatagtagacataatagcaacagacatacaaactaaag

SEQ ID NO: 20631 - DNA, 301 bp, Artificial Sequence
  NTC.44_NTC.41
  crRNA array
  misc_feature (148)..(157): n is a, c, g, or t
cttggctttatatatcttgtggaaaggacgaaacaccgtaatttctactaagtgtagatagcgtcgtacgatttatcgttaatttctactaagtgtagatttgatggcgcgacgcgttattaatttctactaagtgtagatttttttnnnnnnnnnnaagcttggcgtggatccgatatcaactagatcttgagacaaatggcagtattcatccacaattttaaaagaaaaggggggattggggggtacagtgcaggggaaagaatagtagacataatagcaacagacatacaaactaaag

SEQ ID NO: 20632 - DNA, 301 bp, Artificial Sequence
  NTC.44_NTC.18
  crRNA array
  misc_feature (148)..(157): n is a, c, g, or t
cttggctttatatatcttgtggaaaggacgaaacaccgtaatttctactaagtgtagatagcgtcgtacgatttatcgttaatttctactaagtgtagattccggttacgaccggcaaaataatttctactaagtgtagatttttttnnnnnnnnnnaagcttggcgtggatccgatatcaactagatcttgagacaaatggcagtattcatccacaattttaaaagaaaaggggggattggggggtacagtgcaggggaaagaatagtagacataatagcaacagacatacaaactaaag

SEQ ID NO: 20633 - DNA, 301 bp, Artificial Sequence
  NTC.44_NTC.24
  crRNA array
  misc_feature (148)..(157): n is a, c, g, or t
cttggctttatatatcttgtggaaaggacgaaacaccgtaatttctactaagtgtagatagcgtcgtacgatttatcgttaatttctactaagtgtagatactatcgacgttcgtcccggtaatttctactaagtgtagatttttttnnnnnnnnnnaagcttggcgtggatccgatatcaactagatcttgagacaaatggcagtattcatccacaattttaaaagaaaaggggggattggggggtacagtgcaggggaaagaatagtagacataatagcaacagacatacaaactaaag

SEQ ID NO: 20634 - DNA, 301 bp, Artificial Sequence
  NTC.44_NTC.31
  crRNA array
  misc_feature (148)..(157): n is a, c, g, or t
cttggctttatatatcttgtggaaaggacgaaacaccgtaatttctactaagtgtagatagcgtcgtacgatttatcgttaatttctactaagtgtagatgccgaccgcgtgattgtaggtaatttctactaagtgtagatttttttnnnnnnnnnnaagcttggcgtggatccgatatcaactagatcttgagacaaatggcagtattcatccacaattttaaaagaaaaggggggattggggggtacagtgcaggggaaagaatagtagacataatagcaacagacatacaaactaaag

SEQ ID NO: 20635 - DNA, 301 bp, Artificial Sequence
  NTC.44_NTC.51
  crRNA array
  misc_feature (148)..(157): n is a, c, g, or t
cttggctttatatatcttgtggaaaggacgaaacaccgtaatttctactaagtgtagatagcgtcgtacgatttatcgttaatttctactaagtgtagattaacgcgcaacacgccaatgtaatttctactaagtgtagatttttttnnnnnnnnnnaagcttggcgtggatccgatatcaactagatcttgagacaaatggcagtattcatccacaattttaaaagaaaaggggggattggggggtacagtgcaggggaaagaatagtagacataatagcaacagacatacaaactaaag

SEQ ID NO: 20636 - DNA, 301 bp, Artificial Sequence
  NTC.44_NTC.23
  crRNA array
  misc_feature (148)..(157): n is a, c, g, or t
cttggctttatatatcttgtggaaaggacgaaacaccgtaatttctactaagtgtagatagcgtcgtacgatttatcgttaatttctactaagtgtagatacgcgctattatcgtaggtgtaatttctactaagtgtagatttttttnnnnnnnnnnaagcttggcgtggatccgatatcaactagatcttgagacaaatggcagtattcatccacaattttaaaagaaaaggggggattggggggtacagtgcaggggaaagaatagtagacataatagcaacagacatacaaactaaag

SEQ ID NO: 20637 - DNA, 301 bp, Artificial Sequence
  NTC.44_NTC.36
  crRNA array
  misc_feature (148)..(157): n is a, c, g, or t
cttggctttatatatcttgtggaaaggacgaaacaccgtaatttctactaagtgtagatagcgtcgtacgatttatcgttaatttctactaagtgtagatcaacccgccgtagcgggccttaatttctactaagtgtagatttttttnnnnnnnnnnaagcttggcgtggatccgatatcaactagatcttgagacaaatggcagtattcatccacaattttaaaagaaaaggggggattggggggtacagtgcaggggaaagaatagtagacataatagcaacagacatacaaactaaag

SEQ ID NO: 20638 - DNA, 301 bp, Artificial Sequence
  NTC.44_NTC.15
  crRNA array
  misc_feature (148)..(157): n is a, c, g, or t
cttggctttatatatcttgtggaaaggacgaaacaccgtaatttctactaagtgtagatagcgtcgtacgatttatcgttaatttctactaagtgtagatgttgtcgtgccgcgaatttataatttctactaagtgtagatttttttnnnnnnnnnnaagcttggcgtggatccgatatcaactagatcttgagacaaatggcagtattcatccacaattttaaaagaaaaggggggattggggggtacagtgcaggggaaagaatagtagacataatagcaacagacatacaaactaaag

SEQ ID NO: 20639 - DNA, 301 bp, Artificial Sequence
  NTC.44_NTC.45
  crRNA array
  misc_feature (148)..(157): n is a, c, g, or t
cttggctttatatatcttgtggaaaggacgaaacaccgtaatttctactaagtgtagatagcgtcgtacgatttatcgttaatttctactaagtgtagatcggaacgcgtgatactagggtaatttctactaagtgtagatttttttnnnnnnnnnnaagcttggcgtggatccgatatcaactagatcttgagacaaatggcagtattcatccacaattttaaaagaaaaggggggattggggggtacagtgcaggggaaagaatagtagacataatagcaacagacatacaaactaaag

SEQ ID NO: 20640 - DNA, 301 bp, Artificial Sequence
  NTC.44_NTC.12
  crRNA array
  misc_feature (148)..(157): n is a, c, g, or t
cttggctttatatatcttgtggaaaggacgaaacaccgtaatttctactaagtgtagatagcgtcgtacgatttatcgttaatttctactaagtgtagatcgccgacgattaatcaatagtaatttctactaagtgtagatttttttnnnnnnnnnnaagcttggcgtggatccgatatcaactagatcttgagacaaatggcagtattcatccacaattttaaaagaaaaggggggattggggggtacagtgcaggggaaagaatagtagacataatagcaacagacatacaaactaaag

SEQ ID NO: 20641 - DNA, 301 bp, Artificial Sequence
  NTC.44_NTC.19
  crRNA array
  misc_feature (148)..(157): n is a, c, g, or t
cttggctttatatatcttgtggaaaggacgaaacaccgtaatttctactaagtgtagatagcgtcgtacgatttatcgttaatttctactaagtgtagatcgtcgtagaacgatacccgataatttctactaagtgtagatttttttnnnnnnnnnnaagcttggcgtggatccgatatcaactagatcttgagacaaatggcagtattcatccacaattttaaaagaaaaggggggattggggggtacagtgcaggggaaagaatagtagacataatagcaacagacatacaaactaaag

SEQ ID NO: 20642 - DNA, 301 bp, Artificial Sequence
  NTC.44_NTC.20
  crRNA array
  misc_feature (148)..(157): n is a, c, g, or t
cttggctttatatatcttgtggaaaggacgaaacaccgtaatttctactaagtgtagatagcgtcgtacgatttatcgttaatttctactaagtgtagatattccggcgcgaccagaagataatttctactaagtgtagatttttttnnnnnnnnnnaagcttggcgtggatccgatatcaactagatcttgagacaaatggcagtattcatccacaattttaaaagaaaaggggggattggggggtacagtgcaggggaaagaatagtagacataatagcaacagacatacaaactaaag

SEQ ID NO: 20643 - DNA, 301 bp, Artificial Sequence
  NTC.44_NTC.48
  crRNA array
  misc_feature (148)..(157): n is a, c, g, or t
cttggctttatatatcttgtggaaaggacgaaacaccgtaatttctactaagtgtagatagcgtcgtacgatttatcgttaatttctactaagtgtagatcggtcgactacggctgttagtaatttctactaagtgtagatttttttnnnnnnnnnnaagcttggcgtggatccgatatcaactagatcttgagacaaatggcagtattcatccacaattttaaaagaaaaggggggattggggggtacagtgcaggggaaagaatagtagacataatagcaacagacatacaaactaaag

SEQ ID NO: 20644 - DNA, 301 bp, Artificial Sequence
  NTC.44_NTC.26
  crRNA array
  misc_feature (148)..(157): n is a, c, g, or t
cttggctttatatatcttgtggaaaggacgaaacaccgtaatttctactaagtgtagatagcgtcgtacgatttatcgttaatttctactaagtgtagatcgcgacggcggttttaacactaatttctactaagtgtagatttttttnnnnnnnnnnaagcttggcgtggatccgatatcaactagatcttgagacaaatggcagtattcatccacaattttaaaagaaaaggggggattggggggtacagtgcaggggaaagaatagtagacataatagcaacagacatacaaactaaag

SEQ ID NO: 20645 - DNA, 301 bp, Artificial Sequence
  NTC.44_NTC.27
  crRNA array
  misc_feature (148)..(157): n is a, c, g, or t
cttggctttatatatcttgtggaaaggacgaaacaccgtaatttctactaagtgtagatagcgtcgtacgatttatcgttaatttctactaagtgtagatgtcgcgttgcgaccggcgcttaatttctactaagtgtagatttttttnnnnnnnnnnaagcttggcgtggatccgatatcaactagatcttgagacaaatggcagtattcatccacaattttaaaagaaaaggggggattggggggtacagtgcaggggaaagaatagtagacataatagcaacagacatacaaactaaag

SEQ ID NO: 20646 - DNA, 301 bp, Artificial Sequence
  NTC.44_NTC.34
  crRNA array
  misc_feature (148)..(157): n is a, c, g, or t
cttggctttatatatcttgtggaaaggacgaaacaccgtaatttctactaagtgtagatagcgtcgtacgatttatcgttaatttctactaagtgtagattagcgttcgacacgtgaaactaatttctactaagtgtagatttttttnnnnnnnnnnaagcttggcgtggatccgatatcaactagatcttgagacaaatggcagtattcatccacaattttaaaagaaaaggggggattggggggtacagtgcaggggaaagaatagtagacataatagcaacagacatacaaactaaag

SEQ ID NO: 20647 - DNA, 301 bp, Artificial Sequence
  NTC.44_NTC.16
  crRNA array
  misc_feature (148)..(157): n is a, c, g, or t
cttggctttatatatcttgtggaaaggacgaaacaccgtaatttctactaagtgtagatagcgtcgtacgatttatcgttaatttctactaagtgtagatcggtacgttagacgaaaatttaatttctactaagtgtagatttttttnnnnnnnnnnaagcttggcgtggatccgatatcaactagatcttgagacaaatggcagtattcatccacaattttaaaagaaaaggggggattggggggtacagtgcaggggaaagaatagtagacataatagcaacagacatacaaactaaag

SEQ ID NO: 20648 - DNA, 301 bp, Artificial Sequence
  NTC.44_NTC.4
  crRNA array
  misc_feature (148)..(157): n is a, c, g, or t
cttggctttatatatcttgtggaaaggacgaaacaccgtaatttctactaagtgtagatagcgtcgtacgatttatcgttaatttctactaagtgtagatatacccgtcgcgaacgtgagtaatttctactaagtgtagatttttttnnnnnnnnnnaagcttggcgtggatccgatatcaactagatcttgagacaaatggcagtattcatccacaattttaaaagaaaaggggggattggggggtacagtgcaggggaaagaatagtagacataatagcaacagacatacaaactaaag

SEQ ID NO: 20649 - DNA, 301 bp, Artificial Sequence
  NTC.44_NTC.42
  crRNA array
  misc_feature (148)..(157): n is a, c, g, or t
cttggctttatatatcttgtggaaaggacgaaacaccgtaatttctactaagtgtagatagcgtcgtacgatttatcgttaatttctactaagtgtagatggtcaaatcgcggcgataactaatttctactaagtgtagatttttttnnnnnnnnnnaagcttggcgtggatccgatatcaactagatcttgagacaaatggcagtattcatccacaattttaaaagaaaaggggggattggggggtacagtgcaggggaaagaatagtagacataatagcaacagacatacaaactaaag

SEQ ID NO: 20650 - DNA, 301 bp, Artificial Sequence
  NTC.44_NTC.22
  crRNA array
  misc_feature (148)..(157): n is a, c, g, or t
cttggctttatatatcttgtggaaaggacgaaacaccgtaatttctactaagtgtagatagcgtcgtacgatttatcgttaatttctactaagtgtagatgcgcgtcaacgtaatgtgcctaatttctactaagtgtagatttttttnnnnnnnnnnaagcttggcgtggatccgatatcaactagatcttgagacaaatggcagtattcatccacaattttaaaagaaaaggggggattggggggtacagtgcaggggaaagaatagtagacataatagcaacagacatacaaactaaag

SEQ ID NO: 20651 - DNA, 301 bp, Artificial Sequence
  NTC.44_NTC.17
  crRNA array
  misc_feature (148)..(157): n is a, c, g, or t
cttggctttatatatcttgtggaaaggacgaaacaccgtaatttctactaagtgtagatagcgtcgtacgatttatcgttaatttctactaagtgtagattatcgaacgctatcgaacgttaatttctactaagtgtagatttttttnnnnnnnnnnaagcttggcgtggatccgatatcaactagatcttgagacaaatggcagtattcatccacaattttaaaagaaaaggggggattggggggtacagtgcaggggaaagaatagtagacataatagcaacagacatacaaactaaag

SEQ ID NO: 20652 - DNA, 301 bp, Artificial Sequence
  NTC.44_NTC.9
  crRNA array
  misc_feature (148)..(157): n is a, c, g, or t
cttggctttatatatcttgtggaaaggacgaaacaccgtaatttctactaagtgtagatagcgtcgtacgatttatcgttaatttctactaagtgtagatatcgccgtacggctatggcataatttctactaagtgtagatttttttnnnnnnnnnnaagcttggcgtggatccgatatcaactagatcttgagacaaatggcagtattcatccacaattttaaaagaaaaggggggattggggggtacagtgcaggggaaagaatagtagacataatagcaacagacatacaaactaaag

SEQ ID NO: 20653 - DNA, 301 bp, Artificial Sequence
  NTC.44_NTC.30
  crRNA array
  misc_feature (148)..(157): n is a, c, g, or t
cttggctttatatatcttgtggaaaggacgaaacaccgtaatttctactaagtgtagatagcgtcgtacgatttatcgttaatttctactaagtgtagatcgatcgtacgggtgtcctaataatttctactaagtgtagatttttttnnnnnnnnnnaagcttggcgtggatccgatatcaactagatcttgagacaaatggcagtattcatccacaattttaaaagaaaaggggggattggggggtacagtgcaggggaaagaatagtagacataatagcaacagacatacaaactaaag

SEQ ID NO: 20654 - DNA, 301 bp, Artificial Sequence
  NTC.44_NTC.8
  crRNA array
  misc_feature (148)..(157): n is a, c, g, or t
cttggctttatatatcttgtggaaaggacgaaacaccgtaatttctactaagtgtagatagcgtcgtacgatttatcgttaatttctactaagtgtagatcgaccgaggttacgctgggataatttctactaagtgtagatttttttnnnnnnnnnnaagcttggcgtggatccgatatcaactagatcttgagacaaatggcagtattcatccacaattttaaaagaaaaggggggattggggggtacagtgcaggggaaagaatagtagacataatagcaacagacatacaaactaaag

SEQ ID NO: 20655 - DNA, 301 bp, Artificial Sequence
  NTC.44_NTC.46
  crRNA array
  misc_feature (148)..(157): n is a, c, g, or t
cttggctttatatatcttgtggaaaggacgaaacaccgtaatttctactaagtgtagatagcgtcgtacgatttatcgttaatttctactaagtgtagatagcgggtcgtagacgcgcggtaatttctactaagtgtagatttttttnnnnnnnnnnaagcttggcgtggatccgatatcaactagatcttgagacaaatggcagtattcatccacaattttaaaagaaaaggggggattggggggtacagtgcaggggaaagaatagtagacataatagcaacagacatacaaactaaag

SEQ ID NO: 20656 - DNA, 301 bp, Artificial Sequence
  NTC.44_NTC.35
  crRNA array
  misc_feature (148)..(157): n is a, c, g, or t
cttggctttatatatcttgtggaaaggacgaaacaccgtaatttctactaagtgtagatagcgtcgtacgatttatcgttaatttctactaagtgtagattggcgcgtaatcgctattcgtaatttctactaagtgtagatttttttnnnnnnnnnnaagcttggcgtggatccgatatcaactagatcttgagacaaatggcagtattcatccacaattttaaaagaaaaggggggattggggggtacagtgcaggggaaagaatagtagacataatagcaacagacatacaaactaaag

SEQ ID NO: 20657 - DNA, 301 bp, Artificial Sequence
  NTC.44_NTC.10
  crRNA array
  misc_feature (148)..(157): n is a, c, g, or t
cttggctttatatatcttgtggaaaggacgaaacaccgtaatttctactaagtgtagatagcgtcgtacgatttatcgttaatttctactaagtgtagatcgctaagttcgcgcgggccgtaatttctactaagtgtagatttttttnnnnnnnnnnaagcttggcgtggatccgatatcaactagatcttgagacaaatggcagtattcatccacaattttaaaagaaaaggggggattggggggtacagtgcaggggaaagaatagtagacataatagcaacagacatacaaactaaag

SEQ ID NO: 20658 - DNA, 301 bp, Artificial Sequence
  NTC.44_NTC.11
  crRNA array
  misc_feature (148)..(157): n is a, c, g, or t
cttggctttatatatcttgtggaaaggacgaaacaccgtaatttctactaagtgtagatagcgtcgtacgatttatcgttaatttctactaagtgtagatcgttcgtcgacgaagcaatctaatttctactaagtgtagatttttttnnnnnnnnnnaagcttggcgtggatccgatatcaactagatcttgagacaaatggcagtattcatccacaattttaaaagaaaaggggggattggggggtacagtgcaggggaaagaatagtagacataatagcaacagacatacaaactaaag

SEQ ID NO: 20659 - DNA, 301 bp, Artificial Sequence
  NTC.44_NTC.14
  crRNA array
  misc_feature (148)..(157): n is a, c, g, or t
cttggctttatatatcttgtggaaaggacgaaacaccgtaatttctactaagtgtagatagcgtcgtacgatttatcgttaatttctactaagtgtagatccgttcgtgcgatagtgttttaatttctactaagtgtagatttttttnnnnnnnnnnaagcttggcgtggatccgatatcaactagatcttgagacaaatggcagtattcatccacaattttaaaagaaaaggggggattggggggtacagtgcaggggaaagaatagtagacataatagcaacagacatacaaactaaag

SEQ ID NO: 20660 - DNA, 301 bp, Artificial Sequence
  NTC.44_NTC.28
  crRNA array
  misc_feature (148)..(157): n is a, c, g, or t
cttggctttatatatcttgtggaaaggacgaaacaccgtaatttctactaagtgtagatagcgtcgtacgatttatcgttaatttctactaagtgtagataccgctaatcggcgtaaacttaatttctactaagtgtagatttttttnnnnnnnnnnaagcttggcgtggatccgatatcaactagatcttgagacaaatggcagtattcatccacaattttaaaagaaaaggggggattggggggtacagtgcaggggaaagaatagtagacataatagcaacagacatacaaactaaag

SEQ ID NO: 20661 - DNA, 301 bp, Artificial Sequence
  NTC.37_NTC.7
  crRNA array
  misc_feature (148)..(157): n is a, c, g, or t
cttggctttatatatcttgtggaaaggacgaaacaccgtaatttctactaagtgtagattttgcgttgacgcgattacttaatttctactaagtgtagatcgccgaacggataagactattaatttctactaagtgtagatttttttnnnnnnnnnnaagcttggcgtggatccgatatcaactagatcttgagacaaatggcagtattcatccacaattttaaaagaaaaggggggattggggggtacagtgcaggggaaagaatagtagacataatagcaacagacatacaaactaaag

SEQ ID NO: 20662 - DNA, 301 bp, Artificial Sequence
  NTC.37_NTC.49
  crRNA array
  misc_feature (148)..(157): n is a, c, g, or t
cttggctttatatatcttgtggaaaggacgaaacaccgtaatttctactaagtgtagattttgcgttgacgcgattacttaatttctactaagtgtagattcggggcgcgtcaactgaattaatttctactaagtgtagatttttttnnnnnnnnnnaagcttggcgtggatccgatatcaactagatcttgagacaaatggcagtattcatccacaattttaaaagaaaaggggggattggggggtacagtgcaggggaaagaatagtagacataatagcaacagacatacaaactaaag

SEQ ID NO: 20663 - DNA, 301 bp, Artificial Sequence
  NTC.37_NTC.50
  crRNA array
  misc_feature (148)..(157): n is a, c, g, or t
cttggctttatatatcttgtggaaaggacgaaacaccgtaatttctactaagtgtagattttgcgttgacgcgattacttaatttctactaagtgtagatattgccgctcgcgcaaaatctaatttctactaagtgtagatttttttnnnnnnnnnnaagcttggcgtggatccgatatcaactagatcttgagacaaatggcagtattcatccacaattttaaaagaaaaggggggattggggggtacagtgcaggggaaagaatagtagacataatagcaacagacatacaaactaaag

SEQ ID NO: 20664 - DNA, 301 bp, Artificial Sequence
  NTC.37_NTC.39
  crRNA array
  misc_feature (148)..(157): n is a, c, g, or t
cttggctttatatatcttgtggaaaggacgaaacaccgtaatttctactaagtgtagattttgcgttgacgcgattacttaatttctactaagtgtagatccggacgttataacgtttcttaatttctactaagtgtagatttttttnnnnnnnnnnaagcttggcgtggatccgatatcaactagatcttgagacaaatggcagtattcatccacaattttaaaagaaaaggggggattggggggtacagtgcaggggaaagaatagtagacataatagcaacagacatacaaactaaag

SEQ ID NO: 20665 - DNA, 301 bp, Artificial Sequence
  NTC.37_NTC.29
  crRNA array
  misc_feature (148)..(157): n is a, c, g, or t
cttggctttatatatcttgtggaaaggacgaaacaccgtaatttctactaagtgtagattttgcgttgacgcgattacttaatttctactaagtgtagatcgcgatctataccgtctatataatttctactaagtgtagatttttttnnnnnnnnnnaagcttggcgtggatccgatatcaactagatcttgagacaaatggcagtattcatccacaattttaaaagaaaaggggggattggggggtacagtgcaggggaaagaatagtagacataatagcaacagacatacaaactaaag

SEQ ID NO: 20666 - DNA, 301 bp, Artificial Sequence
  NTC.37_NTC.25
  crRNA array
  misc_feature (148)..(157): n is a, c, g, or t
cttggctttatatatcttgtggaaaggacgaaacaccgtaatttctactaagtgtagattttgcgttgacgcgattacttaatttctactaagtgtagattcgcgttatcgtgccgtgcgtaatttctactaagtgtagatttttttnnnnnnnnnnaagcttggcgtggatccgatatcaactagatcttgagacaaatggcagtattcatccacaattttaaaagaaaaggggggattggggggtacagtgcaggggaaagaatagtagacataatagcaacagacatacaaactaaag

SEQ ID NO: 20667 - DNA, 301 bp, Artificial Sequence
  NTC.37_NTC.3
  crRNA array
  misc_feature (148)..(157): n is a, c, g, or t
cttggctttatatatcttgtggaaaggacgaaacaccgtaatttctactaagtgtagattttgcgttgacgcgattacttaatttctactaagtgtagattcgacgcgagacgacgtacataatttctactaagtgtagatttttttnnnnnnnnnnaagcttggcgtggatccgatatcaactagatcttgagacaaatggcagtattcatccacaattttaaaagaaaaggggggattggggggtacagtgcaggggaaagaatagtagacataatagcaacagacatacaaactaaag

SEQ ID NO: 20668 - DNA, 301 bp, Artificial Sequence
  NTC.37_NTC.47
  crRNA array
  misc_feature (148)..(157): n is a, c, g, or t
cttggctttatatatcttgtggaaaggacgaaacaccgtaatttctactaagtgtagattttgcgttgacgcgattacttaatttctactaagtgtagattctcgtatcgcgattgttaataatttctactaagtgtagatttttttnnnnnnnnnnaagcttggcgtggatccgatatcaactagatcttgagacaaatggcagtattcatccacaattttaaaagaaaaggggggattggggggtacagtgcaggggaaagaatagtagacataatagcaacagacatacaaactaaag

SEQ ID NO: 20669 - DNA, 301 bp, Artificial Sequence
  NTC.37_NTC.32
  crRNA array
  misc_feature (148)..(157): n is a, c, g, or t
cttggctttatatatcttgtggaaaggacgaaacaccgtaatttctactaagtgtagattttgcgttgacgcgattacttaatttctactaagtgtagatgcacgttacgcccgggtcactaatttctactaagtgtagatttttttnnnnnnnnnnaagcttggcgtggatccgatatcaactagatcttgagacaaatggcagtattcatccacaattttaaaagaaaaggggggattggggggtacagtgcaggggaaagaatagtagacataatagcaacagacatacaaactaaag

SEQ ID NO: 20670 - DNA, 301 bp, Artificial Sequence
  NTC.37_NTC.40
  crRNA array
  misc_feature (148)..(157): n is a, c, g, or t
cttggctttatatatcttgtggaaaggacgaaacaccgtaatttctactaagtgtagattttgcgttgacgcgattacttaatttctactaagtgtagatattcgcgaacccggccggaataatttctactaagtgtagatttttttnnnnnnnnnnaagcttggcgtggatccgatatcaactagatcttgagacaaatggcagtattcatccacaattttaaaagaaaaggggggattggggggtacagtgcaggggaaagaatagtagacataatagcaacagacatacaaactaaag

SEQ ID NO: 20671 - DNA, 301 bp, Artificial Sequence
  NTC.37_NTC.5
  crRNA array
  misc_feature (148)..(157): n is a, c, g, or t
cttggctttatatatcttgtggaaaggacgaaacaccgtaatttctactaagtgtagattttgcgttgacgcgattacttaatttctactaagtgtagatgcttacgcgtcgcgaatgtataatttctactaagtgtagatttttttnnnnnnnnnnaagcttggcgtggatccgatatcaactagatcttgagacaaatggcagtattcatccacaattttaaaagaaaaggggggattggggggtacagtgcaggggaaagaatagtagacataatagcaacagacatacaaactaaag

SEQ ID NO: 20672 - DNA, 301 bp, Artificial Sequence
  NTC.37_NTC.33
  crRNA array
  misc_feature (148)..(157): n is a, c, g, or t
cttggctttatatatcttgtggaaaggacgaaacaccgtaatttctactaagtgtagattttgcgttgacgcgattacttaatttctactaagtgtagattaagcgaccgacgcattcgctaatttctactaagtgtagatttttttnnnnnnnnnnaagcttggcgtggatccgatatcaactagatcttgagacaaatggcagtattcatccacaattttaaaagaaaaggggggattggggggtacagtgcaggggaaagaatagtagacataatagcaacagacatacaaactaaag

SEQ ID NO: 20673 - DNA, 301 bp, Artificial Sequence
  NTC.37_NTC.1
  crRNA array
  misc_feature (148)..(157): n is a, c, g, or t
cttggctttatatatcttgtggaaaggacgaaacaccgtaatttctactaagtgtagattttgcgttgacgcgattacttaatttctactaagtgtagatcgcgtaaccgttccggctcctaatttctactaagtgtagatttttttnnnnnnnnnnaagcttggcgtggatccgatatcaactagatcttgagacaaatggcagtattcatccacaattttaaaagaaaaggggggattggggggtacagtgcaggggaaagaatagtagacataatagcaacagacatacaaactaaag

SEQ ID NO: 20674 - DNA, 301 bp, Artificial Sequence
  NTC.37_NTC.6
  crRNA array
  misc_feature (148)..(157): n is a, c, g, or t
cttggctttatatatcttgtggaaaggacgaaacaccgtaatttctactaagtgtagattttgcgttgacgcgattacttaatttctactaagtgtagatcgaatcgcgcctacgggaattaatttctactaagtgtagatttttttnnnnnnnnnnaagcttggcgtggatccgatatcaactagatcttgagacaaatggcagtattcatccacaattttaaaagaaaaggggggattggggggtacagtgcaggggaaagaatagtagacataatagcaacagacatacaaactaaag

SEQ ID NO: 20675 - DNA, 301 bp, Artificial Sequence
  NTC.37_NTC.38
  crRNA array
  misc_feature (148)..(157): n is a, c, g, or t
cttggctttatatatcttgtggaaaggacgaaacaccgtaatttctactaagtgtagattttgcgttgacgcgattacttaatttctactaagtgtagataacggagcgcgatactaccataatttctactaagtgtagatttttttnnnnnnnnnnaagcttggcgtggatccgatatcaactagatcttgagacaaatggcagtattcatccacaattttaaaagaaaaggggggattggggggtacagtgcaggggaaagaatagtagacataatagcaacagacatacaaactaaag

SEQ ID NO: 20676 - DNA, 301 bp, Artificial Sequence
  NTC.37_NTC.41
  crRNA array
  misc_feature (148)..(157): n is a, c, g, or t
cttggctttatatatcttgtggaaaggacgaaacaccgtaatttctactaagtgtagattttgcgttgacgcgattacttaatttctactaagtgtagatttgatggcgcgacgcgttattaatttctactaagtgtagatttttttnnnnnnnnnnaagcttggcgtggatccgatatcaactagatcttgagacaaatggcagtattcatccacaattttaaaagaaaaggggggattggggggtacagtgcaggggaaagaatagtagacataatagcaacagacatacaaactaaag

SEQ ID NO: 20677 - DNA, 301 bp, Artificial Sequence
  NTC.37_NTC.18
  crRNA array
  misc_feature (148)..(157): n is a, c, g, or t
cttggctttatatatcttgtggaaaggacgaaacaccgtaatttctactaagtgtagattttgcgttgacgcgattacttaatttctactaagtgtagattccggttacgaccggcaaaataatttctactaagtgtagatttttttnnnnnnnnnnaagcttggcgtggatccgatatcaactagatcttgagacaaatggcagtattcatccacaattttaaaagaaaaggggggattggggggtacagtgcaggggaaagaatagtagacataatagcaacagacatacaaactaaag

SEQ ID NO: 20678 - DNA, 301 bp, Artificial Sequence
  NTC.37_NTC.24
  crRNA array
  misc_feature (148)..(157): n is a, c, g, or t
cttggctttatatatcttgtggaaaggacgaaacaccgtaatttctactaagtgtagattttgcgttgacgcgattacttaatttctactaagtgtagatactatcgacgttcgtcccggtaatttctactaagtgtagatttttttnnnnnnnnnnaagcttggcgtggatccgatatcaactagatcttgagacaaatggcagtattcatccacaattttaaaagaaaaggggggattggggggtacagtgcaggggaaagaatagtagacataatagcaacagacatacaaactaaag

SEQ ID NO: 20679 - DNA, 301 bp, Artificial Sequence
  NTC.37_NTC.31
  crRNA array
  misc_feature (148)..(157): n is a, c, g, or t
cttggctttatatatcttgtggaaaggacgaaacaccgtaatttctactaagtgtagattttgcgttgacgcgattacttaatttctactaagtgtagatgccgaccgcgtgattgtaggtaatttctactaagtgtagatttttttnnnnnnnnnnaagcttggcgtggatccgatatcaactagatcttgagacaaatggcagtattcatccacaattttaaaagaaaaggggggattggggggtacagtgcaggggaaagaatagtagacataatagcaacagacatacaaactaaag

SEQ ID NO: 20680 - DNA, 301 bp, Artificial Sequence
  NTC.37_NTC.51
  crRNA array
  misc_feature (148)..(157): n is a, c, g, or t
cttggctttatatatcttgtggaaaggacgaaacaccgtaatttctactaagtgtagattttgcgttgacgcgattacttaatttctactaagtgtagattaacgcgcaacacgccaatgtaatttctactaagtgtagatttttttnnnnnnnnnnaagcttggcgtggatccgatatcaactagatcttgagacaaatggcagtattcatccacaattttaaaagaaaaggggggattggggggtacagtgcaggggaaagaatagtagacataatagcaacagacatacaaactaaag

SEQ ID NO: 20681 - DNA, 301 bp, Artificial Sequence
  NTC.37_NTC.23
  crRNA array
  misc_feature (148)..(157): n is a, c, g, or t
cttggctttatatatcttgtggaaaggacgaaacaccgtaatttctactaagtgtagattttgcgttgacgcgattacttaatttctactaagtgtagatacgcgctattatcgtaggtgtaatttctactaagtgtagatttttttnnnnnnnnnnaagcttggcgtggatccgatatcaactagatcttgagacaaatggcagtattcatccacaattttaaaagaaaaggggggattggggggtacagtgcaggggaaagaatagtagacataatagcaacagacatacaaactaaag

SEQ ID NO: 20682 - DNA, 301 bp, Artificial Sequence
  NTC.37_NTC.36
  crRNA array
  misc_feature (148)..(157): n is a, c, g, or t
cttggctttatatatcttgtggaaaggacgaaacaccgtaatttctactaagtgtagattttgcgttgacgcgattacttaatttctactaagtgtagatcaacccgccgtagcgggccttaatttctactaagtgtagatttttttnnnnnnnnnnaagcttggcgtggatccgatatcaactagatcttgagacaaatggcagtattcatccacaattttaaaagaaaaggggggattggggggtacagtgcaggggaaagaatagtagacataatagcaacagacatacaaactaaag

SEQ ID NO: 20683 - DNA, 301 bp, Artificial Sequence
  NTC.37_NTC.15
  crRNA array
  misc_feature (148)..(157): n is a, c, g, or t
cttggctttatatatcttgtggaaaggacgaaacaccgtaatttctactaagtgtagattttgcgttgacgcgattacttaatttctactaagtgtagatgttgtcgtgccgcgaatttataatttctactaagtgtagatttttttnnnnnnnnnnaagcttggcgtggatccgatatcaactagatcttgagacaaatggcagtattcatccacaattttaaaagaaaaggggggattggggggtacagtgcaggggaaagaatagtagacataatagcaacagacatacaaactaaag

SEQ ID NO: 20684 - DNA, 301 bp, Artificial Sequence
  NTC.37_NTC.45
  crRNA array
  misc_feature (148)..(157): n is a, c, g, or t
cttggctttatatatcttgtggaaaggacgaaacaccgtaatttctactaagtgtagattttgcgttgacgcgattacttaatttctactaagtgtagatcggaacgcgtgatactagggtaatttctactaagtgtagatttttttnnnnnnnnnnaagcttggcgtggatccgatatcaactagatcttgagacaaatggcagtattcatccacaattttaaaagaaaaggggggattggggggtacagtgcaggggaaagaatagtagacataatagcaacagacatacaaactaaag

SEQ ID NO: 20685 - DNA, 301 bp, Artificial Sequence
  NTC.37_NTC.12
  crRNA array
  misc_feature (148)..(157): n is a, c, g, or t
cttggctttatatatcttgtggaaaggacgaaacaccgtaatttctactaagtgtagattttgcgttgacgcgattacttaatttctactaagtgtagatcgccgacgattaatcaatagtaatttctactaagtgtagatttttttnnnnnnnnnnaagcttggcgtggatccgatatcaactagatcttgagacaaatggcagtattcatccacaattttaaaagaaaaggggggattggggggtacagtgcaggggaaagaatagtagacataatagcaacagacatacaaactaaag

SEQ ID NO: 20686 - DNA, 301 bp, Artificial Sequence
  NTC.37_NTC.19
  crRNA array
  misc_feature (148)..(157): n is a, c, g, or t
cttggctttatatatcttgtggaaaggacgaaacaccgtaatttctactaagtgtagattttgcgttgacgcgattacttaatttctactaagtgtagatcgtcgtagaacgatacccgataatttctactaagtgtagatttttttnnnnnnnnnnaagcttggcgtggatccgatatcaactagatcttgagacaaatggcagtattcatccacaattttaaaagaaaaggggggattggggggtacagtgcaggggaaagaatagtagacataatagcaacagacatacaaactaaag

SEQ ID NO: 20687 - DNA, 301 bp, Artificial Sequence
  NTC.37_NTC.20
  crRNA array
  misc_feature (148)..(157): n is a, c, g, or t
cttggctttatatatcttgtggaaaggacgaaacaccgtaatttctactaagtgtagattttgcgttgacgcgattacttaatttctactaagtgtagatattccggcgcgaccagaagataatttctactaagtgtagatttttttnnnnnnnnnnaagcttggcgtggatccgatatcaactagatcttgagacaaatggcagtattcatccacaattttaaaagaaaaggggggattggggggtacagtgcaggggaaagaatagtagacataatagcaacagacatacaaactaaag

SEQ ID NO: 20688 - DNA, 301 bp, Artificial Sequence
  NTC.37_NTC.48
  crRNA array
  misc_feature (148)..(157): n is a, c, g, or t
cttggctttatatatcttgtggaaaggacgaaacaccgtaatttctactaagtgtagattttgcgttgacgcgattacttaatttctactaagtgtagatcggtcgactacggctgttagtaatttctactaagtgtagatttttttnnnnnnnnnnaagcttggcgtggatccgatatcaactagatcttgagacaaatggcagtattcatccacaattttaaaagaaaaggggggattggggggtacagtgcaggggaaagaatagtagacataatagcaacagacatacaaactaaag

SEQ ID NO: 20689 - DNA, 301 bp, Artificial Sequence
  NTC.37_NTC.26
  crRNA array
  misc_feature (148)..(157): n is a, c, g, or t
cttggctttatatatcttgtggaaaggacgaaacaccgtaatttctactaagtgtagattttgcgttgacgcgattacttaatttctactaagtgtagatcgcgacggcggttttaacactaatttctactaagtgtagatttttttnnnnnnnnnnaagcttggcgtggatccgatatcaactagatcttgagacaaatggcagtattcatccacaattttaaaagaaaaggggggattggggggtacagtgcaggggaaagaatagtagacataatagcaacagacatacaaactaaag

SEQ ID NO: 20690 - DNA, 301 bp, Artificial Sequence
  NTC.37_NTC.27
  crRNA array
  misc_feature (148)..(157): n is a, c, g, or t
cttggctttatatatcttgtggaaaggacgaaacaccgtaatttctactaagtgtagattttgcgttgacgcgattacttaatttctactaagtgtagatgtcgcgttgcgaccggcgcttaatttctactaagtgtagatttttttnnnnnnnnnnaagcttggcgtggatccgatatcaactagatcttgagacaaatggcagtattcatccacaattttaaaagaaaaggggggattggggggtacagtgcaggggaaagaatagtagacataatagcaacagacatacaaactaaag

SEQ ID NO: 20691 - DNA, 301 bp, Artificial Sequence
  NTC.37_NTC.34
  crRNA array
  misc_feature (148)..(157): n is a, c, g, or t
cttggctttatatatcttgtggaaaggacgaaacaccgtaatttctactaagtgtagattttgcgttgacgcgattacttaatttctactaagtgtagattagcgttcgacacgtgaaactaatttctactaagtgtagatttttttnnnnnnnnnnaagcttggcgtggatccgatatcaactagatcttgagacaaatggcagtattcatccacaattttaaaagaaaaggggggattggggggtacagtgcaggggaaagaatagtagacataatagcaacagacatacaaactaaag

SEQ ID NO: 20692 - DNA, 301 bp, Artificial Sequence
  NTC.37_NTC.16
  crRNA array
  misc_feature (148)..(157): n is a, c, g, or t
cttggctttatatatcttgtggaaaggacgaaacaccgtaatttctactaagtgtagattttgcgttgacgcgattacttaatttctactaagtgtagatcggtacgttagacgaaaatttaatttctactaagtgtagatttttttnnnnnnnnnnaagcttggcgtggatccgatatcaactagatcttgagacaaatggcagtattcatccacaattttaaaagaaaaggggggattggggggtacagtgcaggggaaagaatagtagacataatagcaacagacatacaaactaaag

SEQ ID NO: 20693 - DNA, 301 bp, Artificial Sequence
  NTC.37_NTC.4
  crRNA array
  misc_feature (148)..(157): n is a, c, g, or t
cttggctttatatatcttgtggaaaggacgaaacaccgtaatttctactaagtgtagattttgcgttgacgcgattacttaatttctactaagtgtagatatacccgtcgcgaacgtgagtaatttctactaagtgtagatttttttnnnnnnnnnnaagcttggcgtggatccgatatcaactagatcttgagacaaatggcagtattcatccacaattttaaaagaaaaggggggattggggggtacagtgcaggggaaagaatagtagacataatagcaacagacatacaaactaaag

SEQ ID NO: 20694 - DNA, 301 bp, Artificial Sequence
  NTC.37_NTC.42
  crRNA array
  misc_feature (148)..(157): n is a, c, g, or t
cttggctttatatatcttgtggaaaggacgaaacaccgtaatttctactaagtgtagattttgcgttgacgcgattacttaatttctactaagtgtagatggtcaaatcgcggcgataactaatttctactaagtgtagatttttttnnnnnnnnnnaagcttggcgtggatccgatatcaactagatcttgagacaaatggcagtattcatccacaattttaaaagaaaaggggggattggggggtacagtgcaggggaaagaatagtagacataatagcaacagacatacaaactaaag

SEQ ID NO: 20695 - DNA, 301 bp, Artificial Sequence
  NTC.37_NTC.22
  crRNA array
  misc_feature (148)..(157): n is a, c, g, or t
cttggctttatatatcttgtggaaaggacgaaacaccgtaatttctactaagtgtagattttgcgttgacgcgattacttaatttctactaagtgtagatgcgcgtcaacgtaatgtgcctaatttctactaagtgtagatttttttnnnnnnnnnnaagcttggcgtggatccgatatcaactagatcttgagacaaatggcagtattcatccacaattttaaaagaaaaggggggattggggggtacagtgcaggggaaagaatagtagacataatagcaacagacatacaaactaaag

SEQ ID NO: 20696 - DNA, 301 bp, Artificial Sequence
  NTC.37_NTC.17
  crRNA array
  misc_feature (148)..(157): n is a, c, g, or t
cttggctttatatatcttgtggaaaggacgaaacaccgtaatttctactaagtgtagattttgcgttgacgcgattacttaatttctactaagtgtagattatcgaacgctatcgaacgttaatttctactaagtgtagatttttttnnnnnnnnnnaagcttggcgtggatccgatatcaactagatcttgagacaaatggcagtattcatccacaattttaaaagaaaaggggggattggggggtacagtgcaggggaaagaatagtagacataatagcaacagacatacaaactaaag

SEQ ID NO: 20697 - DNA, 301 bp, Artificial Sequence
  NTC.37_NTC.9
  crRNA array
  misc_feature (148)..(157): n is a, c, g, or t
cttggctttatatatcttgtggaaaggacgaaacaccgtaatttctactaagtgtagattttgcgttgacgcgattacttaatttctactaagtgtagatatcgccgtacggctatggcataatttctactaagtgtagatttttttnnnnnnnnnnaagcttggcgtggatccgatatcaactagatcttgagacaaatggcagtattcatccacaattttaaaagaaaaggggggattggggggtacagtgcaggggaaagaatagtagacataatagcaacagacatacaaactaaag

SEQ ID NO: 20698 - DNA, 301 bp, Artificial Sequence
  NTC.37_NTC.30
  crRNA array
  misc_feature (148)..(157): n is a, c, g, or t
cttggctttatatatcttgtggaaaggacgaaacaccgtaatttctactaagtgtagattttgcgttgacgcgattacttaatttctactaagtgtagatcgatcgtacgggtgtcctaataatttctactaagtgtagatttttttnnnnnnnnnnaagcttggcgtggatccgatatcaactagatcttgagacaaatggcagtattcatccacaattttaaaagaaaaggggggattggggggtacagtgcaggggaaagaatagtagacataatagcaacagacatacaaactaaag

SEQ ID NO: 20699 - DNA, 301 bp, Artificial Sequence
  NTC.37_NTC.8
  crRNA array
  misc_feature (148)..(157): n is a, c, g, or t
cttggctttatatatcttgtggaaaggacgaaacaccgtaatttctactaagtgtagattttgcgttgacgcgattacttaatttctactaagtgtagatcgaccgaggttacgctgggataatttctactaagtgtagatttttttnnnnnnnnnnaagcttggcgtggatccgatatcaactagatcttgagacaaatggcagtattcatccacaattttaaaagaaaaggggggattggggggtacagtgcaggggaaagaatagtagacataatagcaacagacatacaaactaaag

SEQ ID NO: 20700 - DNA, 301 bp, Artificial Sequence
  NTC.37_NTC.46
  crRNA array
  misc_feature (148)..(157): n is a, c, g, or t
cttggctttatatatcttgtggaaaggacgaaacaccgtaatttctactaagtgtagattttgcgttgacgcgattacttaatttctactaagtgtagatagcgggtcgtagacgcgcggtaatttctactaagtgtagatttttttnnnnnnnnnnaagcttggcgtggatccgatatcaactagatcttgagacaaatggcagtattcatccacaattttaaaagaaaaggggggattggggggtacagtgcaggggaaagaatagtagacataatagcaacagacatacaaactaaag

SEQ ID NO: 20701 - DNA, 301 bp, Artificial Sequence
  NTC.37_NTC.35
  crRNA array
  misc_feature (148)..(157): n is a, c, g, or t
cttggctttatatatcttgtggaaaggacgaaacaccgtaatttctactaagtgtagattttgcgttgacgcgattacttaatttctactaagtgtagattggcgcgtaatcgctattcgtaatttctactaagtgtagatttttttnnnnnnnnnnaagcttggcgtggatccgatatcaactagatcttgagacaaatggcagtattcatccacaattttaaaagaaaaggggggattggggggtacagtgcaggggaaagaatagtagacataatagcaacagacatacaaactaaag

SEQ ID NO: 20702 - DNA, 301 bp, Artificial Sequence
  NTC.37_NTC.10
  crRNA array
  misc_feature (148)..(157): n is a, c, g, or t
cttggctttatatatcttgtggaaaggacgaaacaccgtaatttctactaagtgtagattttgcgttgacgcgattacttaatttctactaagtgtagatcgctaagttcgcgcgggccgtaatttctactaagtgtagatttttttnnnnnnnnnnaagcttggcgtggatccgatatcaactagatcttgagacaaatggcagtattcatccacaattttaaaagaaaaggggggattggggggtacagtgcaggggaaagaatagtagacataatagcaacagacatacaaactaaag

SEQ ID NO: 20703 - DNA, 301 bp, Artificial Sequence
  NTC.37_NTC.11
  crRNA array
  misc_feature (148)..(157): n is a, c, g, or t
cttggctttatatatcttgtggaaaggacgaaacaccgtaatttctactaagtgtagattttgcgttgacgcgattacttaatttctactaagtgtagatcgttcgtcgacgaagcaatctaatttctactaagtgtagatttttttnnnnnnnnnnaagcttggcgtggatccgatatcaactagatcttgagacaaatggcagtattcatccacaattttaaaagaaaaggggggattggggggtacagtgcaggggaaagaatagtagacataatagcaacagacatacaaactaaag

SEQ ID NO: 20704 - DNA, 301 bp, Artificial Sequence
  NTC.37_NTC.14
  crRNA array
  misc_feature (148)..(157): n is a, c, g, or t
cttggctttatatatcttgtggaaaggacgaaacaccgtaatttctactaagtgtagattttgcgttgacgcgattacttaatttctactaagtgtagatccgttcgtgcgatagtgttttaatttctactaagtgtagatttttttnnnnnnnnnnaagcttggcgtggatccgatatcaactagatcttgagacaaatggcagtattcatccacaattttaaaagaaaaggggggattggggggtacagtgcaggggaaagaatagtagacataatagcaacagacatacaaactaaag

SEQ ID NO: 20705 - DNA, 301 bp, Artificial Sequence
  NTC.37_NTC.28
  crRNA array
  misc_feature (148)..(157): n is a, c, g, or t
cttggctttatatatcttgtggaaaggacgaaacaccgtaatttctactaagtgtagattttgcgttgacgcgattacttaatttctactaagtgtagataccgctaatcggcgtaaacttaatttctactaagtgtagatttttttnnnnnnnnnnaagcttggcgtggatccgatatcaactagatcttgagacaaatggcagtattcatccacaattttaaaagaaaaggggggattggggggtacagtgcaggggaaagaatagtagacataatagcaacagacatacaaactaaag

SEQ ID NO: 20706 - DNA, 301 bp, Artificial Sequence
  NTC.7_NTC.49
  crRNA array
  misc_feature (148)..(157): n is a, c, g, or t
cttggctttatatatcttgtggaaaggacgaaacaccgtaatttctactaagtgtagatcgccgaacggataagactattaatttctactaagtgtagattcggggcgcgtcaactgaattaatttctactaagtgtagatttttttnnnnnnnnnnaagcttggcgtggatccgatatcaactagatcttgagacaaatggcagtattcatccacaattttaaaagaaaaggggggattggggggtacagtgcaggggaaagaatagtagacataatagcaacagacatacaaactaaag

SEQ ID NO: 20707 - DNA, 301 bp, Artificial Sequence
  NTC.7_NTC.50
  crRNA array
  misc_feature (148)..(157): n is a, c, g, or t
cttggctttatatatcttgtggaaaggacgaaacaccgtaatttctactaagtgtagatcgccgaacggataagactattaatttctactaagtgtagatattgccgctcgcgcaaaatctaatttctactaagtgtagatttttttnnnnnnnnnnaagcttggcgtggatccgatatcaactagatcttgagacaaatggcagtattcatccacaattttaaaagaaaaggggggattggggggtacagtgcaggggaaagaatagtagacataatagcaacagacatacaaactaaag

SEQ ID NO: 20708 - DNA, 301 bp, Artificial Sequence
  NTC.7_NTC.39
  crRNA array
  misc_feature (148)..(157): n is a, c, g, or t
cttggctttatatatcttgtggaaaggacgaaacaccgtaatttctactaagtgtagatcgccgaacggataagactattaatttctactaagtgtagatccggacgttataacgtttcttaatttctactaagtgtagatttttttnnnnnnnnnnaagcttggcgtggatccgatatcaactagatcttgagacaaatggcagtattcatccacaattttaaaagaaaaggggggattggggggtacagtgcaggggaaagaatagtagacataatagcaacagacatacaaactaaag

SEQ ID NO: 20709 - DNA, 301 bp, Artificial Sequence
  NTC.7_NTC.29
  crRNA array
  misc_feature (148)..(157): n is a, c, g, or t
cttggctttatatatcttgtggaaaggacgaaacaccgtaatttctactaagtgtagatcgccgaacggataagactattaatttctactaagtgtagatcgcgatctataccgtctatataatttctactaagtgtagatttttttnnnnnnnnnnaagcttggcgtggatccgatatcaactagatcttgagacaaatggcagtattcatccacaattttaaaagaaaaggggggattggggggtacagtgcaggggaaagaatagtagacataatagcaacagacatacaaactaaag

SEQ ID NO: 20710 - DNA, 301 bp, Artificial Sequence
  NTC.7_NTC.25
  crRNA array
  misc_feature (148)..(157): n is a, c, g, or t
cttggctttatatatcttgtggaaaggacgaaacaccgtaatttctactaagtgtagatcgccgaacggataagactattaatttctactaagtgtagattcgcgttatcgtgccgtgcgtaatttctactaagtgtagatttttttnnnnnnnnnnaagcttggcgtggatccgatatcaactagatcttgagacaaatggcagtattcatccacaattttaaaagaaaaggggggattggggggtacagtgcaggggaaagaatagtagacataatagcaacagacatacaaactaaag

SEQ ID NO: 20711 - DNA, 301 bp, Artificial Sequence
  NTC.7_NTC.3
  crRNA array
  misc_feature (148)..(157): n is a, c, g, or t
cttggctttatatatcttgtggaaaggacgaaacaccgtaatttctactaagtgtagatcgccgaacggataagactattaatttctactaagtgtagattcgacgcgagacgacgtacataatttctactaagtgtagatttttttnnnnnnnnnnaagcttggcgtggatccgatatcaactagatcttgagacaaatggcagtattcatccacaattttaaaagaaaaggggggattggggggtacagtgcaggggaaagaatagtagacataatagcaacagacatacaaactaaag

SEQ ID NO: 20712 - DNA, 301 bp, Artificial Sequence
  NTC.7_NTC.47
  crRNA array
  misc_feature (148)..(157): n is a, c, g, or t
cttggctttatatatcttgtggaaaggacgaaacaccgtaatttctactaagtgtagatcgccgaacggataagactattaatttctactaagtgtagattctcgtatcgcgattgttaataatttctactaagtgtagatttttttnnnnnnnnnnaagcttggcgtggatccgatatcaactagatcttgagacaaatggcagtattcatccacaattttaaaagaaaaggggggattggggggtacagtgcaggggaaagaatagtagacataatagcaacagacatacaaactaaag

SEQ ID NO: 20713 - DNA, 301 bp, Artificial Sequence
  NTC.7_NTC.32
  crRNA array
  misc_feature (148)..(157): n is a, c, g, or t
cttggctttatatatcttgtggaaaggacgaaacaccgtaatttctactaagtgtagatcgccgaacggataagactattaatttctactaagtgtagatgcacgttacgcccgggtcactaatttctactaagtgtagatttttttnnnnnnnnnnaagcttggcgtggatccgatatcaactagatcttgagacaaatggcagtattcatccacaattttaaaagaaaaggggggattggggggtacagtgcaggggaaagaatagtagacataatagcaacagacatacaaactaaag

SEQ ID NO: 20714 - DNA, 301 bp, Artificial Sequence
  NTC.7_NTC.40
  crRNA array
  misc_feature (148)..(157): n is a, c, g, or t
cttggctttatatatcttgtggaaaggacgaaacaccgtaatttctactaagtgtagatcgccgaacggataagactattaatttctactaagtgtagatattcgcgaacccggccggaataatttctactaagtgtagatttttttnnnnnnnnnnaagcttggcgtggatccgatatcaactagatcttgagacaaatggcagtattcatccacaattttaaaagaaaaggggggattggggggtacagtgcaggggaaagaatagtagacataatagcaacagacatacaaactaaag

SEQ ID NO: 20715 - DNA, 301 bp, Artificial Sequence
  NTC.7_NTC.5
  crRNA array
  misc_feature (148)..(157): n is a, c, g, or t
cttggctttatatatcttgtggaaaggacgaaacaccgtaatttctactaagtgtagatcgccgaacggataagactattaatttctactaagtgtagatgcttacgcgtcgcgaatgtataatttctactaagtgtagatttttttnnnnnnnnnnaagcttggcgtggatccgatatcaactagatcttgagacaaatggcagtattcatccacaattttaaaagaaaaggggggattggggggtacagtgcaggggaaagaatagtagacataatagcaacagacatacaaactaaag

SEQ ID NO: 20716 - DNA, 301 bp, Artificial Sequence
  NTC.7_NTC.33
  crRNA array
  misc_feature (148)..(157): n is a, c, g, or t
cttggctttatatatcttgtggaaaggacgaaacaccgtaatttctactaagtgtagatcgccgaacggataagactattaatttctactaagtgtagattaagcgaccgacgcattcgctaatttctactaagtgtagatttttttnnnnnnnnnnaagcttggcgtggatccgatatcaactagatcttgagacaaatggcagtattcatccacaattttaaaagaaaaggggggattggggggtacagtgcaggggaaagaatagtagacataatagcaacagacatacaaactaaag

SEQ ID NO: 20717 - DNA, 301 bp, Artificial Sequence
  NTC.7_NTC.1
  crRNA array
  misc_feature (148)..(157): n is a, c, g, or t
cttggctttatatatcttgtggaaaggacgaaacaccgtaatttctactaagtgtagatcgccgaacggataagactattaatttctactaagtgtagatcgcgtaaccgttccggctcctaatttctactaagtgtagatttttttnnnnnnnnnnaagcttggcgtggatccgatatcaactagatcttgagacaaatggcagtattcatccacaattttaaaagaaaaggggggattggggggtacagtgcaggggaaagaatagtagacataatagcaacagacatacaaactaaag

SEQ ID NO: 20718 - DNA, 301 bp, Artificial Sequence
  NTC.7_NTC.6
  crRNA array
  misc_feature (148)..(157): n is a, c, g, or t
cttggctttatatatcttgtggaaaggacgaaacaccgtaatttctactaagtgtagatcgccgaacggataagactattaatttctactaagtgtagatcgaatcgcgcctacgggaattaatttctactaagtgtagatttttttnnnnnnnnnnaagcttggcgtggatccgatatcaactagatcttgagacaaatggcagtattcatccacaattttaaaagaaaaggggggattggggggtacagtgcaggggaaagaatagtagacataatagcaacagacatacaaactaaag

SEQ ID NO: 20719 - DNA, 301 bp, Artificial Sequence
  NTC.7_NTC.38
  crRNA array
  misc_feature (148)..(157): n is a, c, g, or t
cttggctttatatatcttgtggaaaggacgaaacaccgtaatttctactaagtgtagatcgccgaacggataagactattaatttctactaagtgtagataacggagcgcgatactaccataatttctactaagtgtagatttttttnnnnnnnnnnaagcttggcgtggatccgatatcaactagatcttgagacaaatggcagtattcatccacaattttaaaagaaaaggggggattggggggtacagtgcaggggaaagaatagtagacataatagcaacagacatacaaactaaag

SEQ ID NO: 20720 - DNA, 301 bp, Artificial Sequence
  NTC.7_NTC.41
  crRNA array
  misc_feature (148)..(157): n is a, c, g, or t
cttggctttatatatcttgtggaaaggacgaaacaccgtaatttctactaagtgtagatcgccgaacggataagactattaatttctactaagtgtagatttgatggcgcgacgcgttattaatttctactaagtgtagatttttttnnnnnnnnnnaagcttggcgtggatccgatatcaactagatcttgagacaaatggcagtattcatccacaattttaaaagaaaaggggggattggggggtacagtgcaggggaaagaatagtagacataatagcaacagacatacaaactaaag

SEQ ID NO: 20721 - DNA, 301 bp, Artificial Sequence
  NTC.7_NTC.18
  crRNA array
  misc_feature (148)..(157): n is a, c, g, or t
cttggctttatatatcttgtggaaaggacgaaacaccgtaatttctactaagtgtagatcgccgaacggataagactattaatttctactaagtgtagattccggttacgaccggcaaaataatttctactaagtgtagatttttttnnnnnnnnnnaagcttggcgtggatccgatatcaactagatcttgagacaaatggcagtattcatccacaattttaaaagaaaaggggggattggggggtacagtgcaggggaaagaatagtagacataatagcaacagacatacaaactaaag

SEQ ID NO: 20722 - DNA, 301 bp, Artificial Sequence
  NTC.7_NTC.24
  crRNA array
  misc_feature (148)..(157): n is a, c, g, or t
cttggctttatatatcttgtggaaaggacgaaacaccgtaatttctactaagtgtagatcgccgaacggataagactattaatttctactaagtgtagatactatcgacgttcgtcccggtaatttctactaagtgtagatttttttnnnnnnnnnnaagcttggcgtggatccgatatcaactagatcttgagacaaatggcagtattcatccacaattttaaaagaaaaggggggattggggggtacagtgcaggggaaagaatagtagacataatagcaacagacatacaaactaaag

SEQ ID NO: 20723 - DNA, 301 bp, Artificial Sequence
  NTC.7_NTC.31
  crRNA array
  misc_feature (148)..(157): n is a, c, g, or t
cttggctttatatatcttgtggaaaggacgaaacaccgtaatttctactaagtgtagatcgccgaacggataagactattaatttctactaagtgtagatgccgaccgcgtgattgtaggtaatttctactaagtgtagatttttttnnnnnnnnnnaagcttggcgtggatccgatatcaactagatcttgagacaaatggcagtattcatccacaattttaaaagaaaaggggggattggggggtacagtgcaggggaaagaatagtagacataatagcaacagacatacaaactaaag

SEQ ID NO: 20724 - DNA, 301 bp, Artificial Sequence
  NTC.7_NTC.51
  crRNA array
  misc_feature (148)..(157): n is a, c, g, or t
cttggctttatatatcttgtggaaaggacgaaacaccgtaatttctactaagtgtagatcgccgaacggataagactattaatttctactaagtgtagattaacgcgcaacacgccaatgtaatttctactaagtgtagatttttttnnnnnnnnnnaagcttggcgtggatccgatatcaactagatcttgagacaaatggcagtattcatccacaattttaaaagaaaaggggggattggggggtacagtgcaggggaaagaatagtagacataatagcaacagacatacaaactaaag

SEQ ID NO: 20725 - DNA, 301 bp, Artificial Sequence
  NTC.7_NTC.23
  crRNA array
  misc_feature (148)..(157): n is a, c, g, or t
cttggctttatatatcttgtggaaaggacgaaacaccgtaatttctactaagtgtagatcgccgaacggataagactattaatttctactaagtgtagatacgcgctattatcgtaggtgtaatttctactaagtgtagatttttttnnnnnnnnnnaagcttggcgtggatccgatatcaactagatcttgagacaaatggcagtattcatccacaattttaaaagaaaaggggggattggggggtacagtgcaggggaaagaatagtagacataatagcaacagacatacaaactaaag

SEQ ID NO: 20726 - DNA, 301 bp, Artificial Sequence
  NTC.7_NTC.36
  crRNA array
  misc_feature (148)..(157): n is a, c, g, or t
cttggctttatatatcttgtggaaaggacgaaacaccgtaatttctactaagtgtagatcgccgaacggataagactattaatttctactaagtgtagatcaacccgccgtagcgggccttaatttctactaagtgtagatttttttnnnnnnnnnnaagcttggcgtggatccgatatcaactagatcttgagacaaatggcagtattcatccacaattttaaaagaaaaggggggattggggggtacagtgcaggggaaagaatagtagacataatagcaacagacatacaaactaaag

SEQ ID NO: 20727 - DNA, 301 bp, Artificial Sequence
  NTC.7_NTC.15
  crRNA array
  misc_feature (148)..(157): n is a, c, g, or t
cttggctttatatatcttgtggaaaggacgaaacaccgtaatttctactaagtgtagatcgccgaacggataagactattaatttctactaagtgtagatgttgtcgtgccgcgaatttataatttctactaagtgtagatttttttnnnnnnnnnnaagcttggcgtggatccgatatcaactagatcttgagacaaatggcagtattcatccacaattttaaaagaaaaggggggattggggggtacagtgcaggggaaagaatagtagacataatagcaacagacatacaaactaaag

SEQ ID NO: 20728 - DNA, 301 bp, Artificial Sequence
  NTC.7_NTC.45
  crRNA array
  misc_feature (148)..(157): n is a, c, g, or t
cttggctttatatatcttgtggaaaggacgaaacaccgtaatttctactaagtgtagatcgccgaacggataagactattaatttctactaagtgtagatcggaacgcgtgatactagggtaatttctactaagtgtagatttttttnnnnnnnnnnaagcttggcgtggatccgatatcaactagatcttgagacaaatggcagtattcatccacaattttaaaagaaaaggggggattggggggtacagtgcaggggaaagaatagtagacataatagcaacagacatacaaactaaag

SEQ ID NO: 20729 - DNA, 301 bp, Artificial Sequence
  NTC.7_NTC.12
  crRNA array
  misc_feature (148)..(157): n is a, c, g, or t
cttggctttatatatcttgtggaaaggacgaaacaccgtaatttctactaagtgtagatcgccgaacggataagactattaatttctactaagtgtagatcgccgacgattaatcaatagtaatttctactaagtgtagatttttttnnnnnnnnnnaagcttggcgtggatccgatatcaactagatcttgagacaaatggcagtattcatccacaattttaaaagaaaaggggggattggggggtacagtgcaggggaaagaatagtagacataatagcaacagacatacaaactaaag

SEQ ID NO: 20730 - DNA, 301 bp, Artificial Sequence
  NTC.7_NTC.19
  crRNA array
  misc_feature (148)..(157): n is a, c, g, or t
cttggctttatatatcttgtggaaaggacgaaacaccgtaatttctactaagtgtagatcgccgaacggataagactattaatttctactaagtgtagatcgtcgtagaacgatacccgataatttctactaagtgtagatttttttnnnnnnnnnnaagcttggcgtggatccgatatcaactagatcttgagacaaatggcagtattcatccacaattttaaaagaaaaggggggattggggggtacagtgcaggggaaagaatagtagacataatagcaacagacatacaaactaaag

SEQ ID NO: 20731 - DNA, 301 bp, Artificial Sequence
  NTC.7_NTC.20
  crRNA array
  misc_feature (148)..(157): n is a, c, g, or t
cttggctttatatatcttgtggaaaggacgaaacaccgtaatttctactaagtgtagatcgccgaacggataagactattaatttctactaagtgtagatattccggcgcgaccagaagataatttctactaagtgtagatttttttnnnnnnnnnnaagcttggcgtggatccgatatcaactagatcttgagacaaatggcagtattcatccacaattttaaaagaaaaggggggattggggggtacagtgcaggggaaagaatagtagacataatagcaacagacatacaaactaaag

SEQ ID NO: 20732 - DNA, 301 bp, Artificial Sequence
  NTC.7_NTC.48
  crRNA array
  misc_feature (148)..(157): n is a, c, g, or t
cttggctttatatatcttgtggaaaggacgaaacaccgtaatttctactaagtgtagatcgccgaacggataagactattaatttctactaagtgtagatcggtcgactacggctgttagtaatttctactaagtgtagatttttttnnnnnnnnnnaagcttggcgtggatccgatatcaactagatcttgagacaaatggcagtattcatccacaattttaaaagaaaaggggggattggggggtacagtgcaggggaaagaatagtagacataatagcaacagacatacaaactaaag

SEQ ID NO: 20733 - DNA, 301 bp, Artificial Sequence
  NTC.7_NTC.26
  crRNA array
  misc_feature (148)..(157): n is a, c, g, or t
cttggctttatatatcttgtggaaaggacgaaacaccgtaatttctactaagtgtagatcgccgaacggataagactattaatttctactaagtgtagatcgcgacggcggttttaacactaatttctactaagtgtagatttttttnnnnnnnnnnaagcttggcgtggatccgatatcaactagatcttgagacaaatggcagtattcatccacaattttaaaagaaaaggggggattggggggtacagtgcaggggaaagaatagtagacataatagcaacagacatacaaactaaag

SEQ ID NO: 20734 - DNA, 301 bp, Artificial Sequence
  NTC.7_NTC.27
  crRNA array
  misc_feature (148)..(157): n is a, c, g, or t
cttggctttatatatcttgtggaaaggacgaaacaccgtaatttctactaagtgtagatcgccgaacggataagactattaatttctactaagtgtagatgtcgcgttgcgaccggcgcttaatttctactaagtgtagatttttttnnnnnnnnnnaagcttggcgtggatccgatatcaactagatcttgagacaaatggcagtattcatccacaattttaaaagaaaaggggggattggggggtacagtgcaggggaaagaatagtagacataatagcaacagacatacaaactaaag

SEQ ID NO: 20735 - DNA, 301 bp, Artificial Sequence
  NTC.7_NTC.34
  crRNA array
  misc_feature (148)..(157): n is a, c, g, or t
cttggctttatatatcttgtggaaaggacgaaacaccgtaatttctactaagtgtagatcgccgaacggataagactattaatttctactaagtgtagattagcgttcgacacgtgaaactaatttctactaagtgtagatttttttnnnnnnnnnnaagcttggcgtggatccgatatcaactagatcttgagacaaatggcagtattcatccacaattttaaaagaaaaggggggattggggggtacagtgcaggggaaagaatagtagacataatagcaacagacatacaaactaaag

SEQ ID NO: 20736 - DNA, 301 bp, Artificial Sequence
  NTC.7_NTC.16
  crRNA array
  misc_feature (148)..(157): n is a, c, g, or t
cttggctttatatatcttgtggaaaggacgaaacaccgtaatttctactaagtgtagatcgccgaacggataagactattaatttctactaagtgtagatcggtacgttagacgaaaatttaatttctactaagtgtagatttttttnnnnnnnnnnaagcttggcgtggatccgatatcaactagatcttgagacaaatggcagtattcatccacaattttaaaagaaaaggggggattggggggtacagtgcaggggaaagaatagtagacataatagcaacagacatacaaactaaag

SEQ ID NO: 20737 - DNA, 301 bp, Artificial Sequence
  NTC.7_NTC.4
  crRNA array
  misc_feature (148)..(157): n is a, c, g, or t
cttggctttatatatcttgtggaaaggacgaaacaccgtaatttctactaagtgtagatcgccgaacggataagactattaatttctactaagtgtagatatacccgtcgcgaacgtgagtaatttctactaagtgtagatttttttnnnnnnnnnnaagcttggcgtggatccgatatcaactagatcttgagacaaatggcagtattcatccacaattttaaaagaaaaggggggattggggggtacagtgcaggggaaagaatagtagacataatagcaacagacatacaaactaaag

SEQ ID NO: 20738 - DNA, 301 bp, Artificial Sequence
  NTC.7_NTC.42
  crRNA array
  misc_feature (148)..(157): n is a, c, g, or t
cttggctttatatatcttgtggaaaggacgaaacaccgtaatttctactaagtgtagatcgccgaacggataagactattaatttctactaagtgtagatggtcaaatcgcggcgataactaatttctactaagtgtagatttttttnnnnnnnnnnaagcttggcgtggatccgatatcaactagatcttgagacaaatggcagtattcatccacaattttaaaagaaaaggggggattggggggtacagtgcaggggaaagaatagtagacataatagcaacagacatacaaactaaag

SEQ ID NO: 20739 - DNA, 301 bp, Artificial Sequence
  NTC.7_NTC.22
  crRNA array
  misc_feature (148)..(157): n is a, c, g, or t
cttggctttatatatcttgtggaaaggacgaaacaccgtaatttctactaagtgtagatcgccgaacggataagactattaatttctactaagtgtagatgcgcgtcaacgtaatgtgcctaatttctactaagtgtagatttttttnnnnnnnnnnaagcttggcgtggatccgatatcaactagatcttgagacaaatggcagtattcatccacaattttaaaagaaaaggggggattggggggtacagtgcaggggaaagaatagtagacataatagcaacagacatacaaactaaag

SEQ ID NO: 20740 - DNA, 301 bp, Artificial Sequence
  NTC.7_NTC.17
  crRNA array
  misc_feature (148)..(157): n is a, c, g, or t
cttggctttatatatcttgtggaaaggacgaaacaccgtaatttctactaagtgtagatcgccgaacggataagactattaatttctactaagtgtagattatcgaacgctatcgaacgttaatttctactaagtgtagatttttttnnnnnnnnnnaagcttggcgtggatccgatatcaactagatcttgagacaaatggcagtattcatccacaattttaaaagaaaaggggggattggggggtacagtgcaggggaaagaatagtagacataatagcaacagacatacaaactaaag

SEQ ID NO: 20741 - DNA, 301 bp, Artificial Sequence
  NTC.7_NTC.9
  crRNA array
  misc_feature (148)..(157): n is a, c, g, or t
cttggctttatatatcttgtggaaaggacgaaacaccgtaatttctactaagtgtagatcgccgaacggataagactattaatttctactaagtgtagatatcgccgtacggctatggcataatttctactaagtgtagatttttttnnnnnnnnnnaagcttggcgtggatccgatatcaactagatcttgagacaaatggcagtattcatccacaattttaaaagaaaaggggggattggggggtacagtgcaggggaaagaatagtagacataatagcaacagacatacaaactaaag

SEQ ID NO: 20742 - DNA, 301 bp, Artificial Sequence
  NTC.7_NTC.30
  crRNA array
  misc_feature (148)..(157): n is a, c, g, or t
cttggctttatatatcttgtggaaaggacgaaacaccgtaatttctactaagtgtagatcgccgaacggataagactattaatttctactaagtgtagatcgatcgtacgggtgtcctaataatttctactaagtgtagatttttttnnnnnnnnnnaagcttggcgtggatccgatatcaactagatcttgagacaaatggcagtattcatccacaattttaaaagaaaaggggggattggggggtacagtgcaggggaaagaatagtagacataatagcaacagacatacaaactaaag

SEQ ID NO: 20743 - DNA, 301 bp, Artificial Sequence
  NTC.7_NTC.8
  crRNA array
  misc_feature (148)..(157): n is a, c, g, or t
cttggctttatatatcttgtggaaaggacgaaacaccgtaatttctactaagtgtagatcgccgaacggataagactattaatttctactaagtgtagatcgaccgaggttacgctgggataatttctactaagtgtagatttttttnnnnnnnnnnaagcttggcgtggatccgatatcaactagatcttgagacaaatggcagtattcatccacaattttaaaagaaaaggggggattggggggtacagtgcaggggaaagaatagtagacataatagcaacagacatacaaactaaag

SEQ ID NO: 20744 - DNA, 301 bp, Artificial Sequence
  NTC.7_NTC.46
  crRNA array
  misc_feature (148)..(157): n is a, c, g, or t
cttggctttatatatcttgtggaaaggacgaaacaccgtaatttctactaagtgtagatcgccgaacggataagactattaatttctactaagtgtagatagcgggtcgtagacgcgcggtaatttctactaagtgtagatttttttnnnnnnnnnnaagcttggcgtggatccgatatcaactagatcttgagacaaatggcagtattcatccacaattttaaaagaaaaggggggattggggggtacagtgcaggggaaagaatagtagacataatagcaacagacatacaaactaaag

SEQ ID NO: 20745 - DNA, 301 bp, Artificial Sequence
  NTC.7_NTC.35
  crRNA array
  misc_feature (148)..(157): n is a, c, g, or t
cttggctttatatatcttgtggaaaggacgaaacaccgtaatttctactaagtgtagatcgccgaacggataagactattaatttctactaagtgtagattggcgcgtaatcgctattcgtaatttctactaagtgtagatttttttnnnnnnnnnnaagcttggcgtggatccgatatcaactagatcttgagacaaatggcagtattcatccacaattttaaaagaaaaggggggattggggggtacagtgcaggggaaagaatagtagacataatagcaacagacatacaaactaaag

SEQ ID NO: 20746 - DNA, 301 bp, Artificial Sequence
  NTC.7_NTC.10
  crRNA array
  misc_feature (148)..(157): n is a, c, g, or t
cttggctttatatatcttgtggaaaggacgaaacaccgtaatttctactaagtgtagatcgccgaacggataagactattaatttctactaagtgtagatcgctaagttcgcgcgggccgtaatttctactaagtgtagatttttttnnnnnnnnnnaagcttggcgtggatccgatatcaactagatcttgagacaaatggcagtattcatccacaattttaaaagaaaaggggggattggggggtacagtgcaggggaaagaatagtagacataatagcaacagacatacaaactaaag

SEQ ID NO: 20747 - DNA, 301 bp, Artificial Sequence
  NTC.7_NTC.11
  crRNA array
  misc_feature (148)..(157): n is a, c, g, or t
cttggctttatatatcttgtggaaaggacgaaacaccgtaatttctactaagtgtagatcgccgaacggataagactattaatttctactaagtgtagatcgttcgtcgacgaagcaatctaatttctactaagtgtagatttttttnnnnnnnnnnaagcttggcgtggatccgatatcaactagatcttgagacaaatggcagtattcatccacaattttaaaagaaaaggggggattggggggtacagtgcaggggaaagaatagtagacataatagcaacagacatacaaactaaag

SEQ ID NO: 20748 - DNA, 301 bp, Artificial Sequence
  NTC.7_NTC.14
  crRNA array
  misc_feature (148)..(157): n is a, c, g, or t
cttggctttatatatcttgtggaaaggacgaaacaccgtaatttctactaagtgtagatcgccgaacggataagactattaatttctactaagtgtagatccgttcgtgcgatagtgttttaatttctactaagtgtagatttttttnnnnnnnnnnaagcttggcgtggatccgatatcaactagatcttgagacaaatggcagtattcatccacaattttaaaagaaaaggggggattggggggtacagtgcaggggaaagaatagtagacataatagcaacagacatacaaactaaag

SEQ ID NO: 20749 - DNA, 301 bp, Artificial Sequence
  NTC.7_NTC.28
  crRNA array
  misc_feature (148)..(157): n is a, c, g, or t
cttggctttatatatcttgtggaaaggacgaaacaccgtaatttctactaagtgtagatcgccgaacggataagactattaatttctactaagtgtagataccgctaatcggcgtaaacttaatttctactaagtgtagatttttttnnnnnnnnnnaagcttggcgtggatccgatatcaactagatcttgagacaaatggcagtattcatccacaattttaaaagaaaaggggggattggggggtacagtgcaggggaaagaatagtagacataatagcaacagacatacaaactaaag

SEQ ID NO: 20750 - DNA, 301 bp, Artificial Sequence
  NTC.49_NTC.50
  crRNA array
  misc_feature (148)..(157): n is a, c, g, or t
cttggctttatatatcttgtggaaaggacgaaacaccgtaatttctactaagtgtagattcggggcgcgtcaactgaattaatttctactaagtgtagatattgccgctcgcgcaaaatctaatttctactaagtgtagatttttttnnnnnnnnnnaagcttggcgtggatccgatatcaactagatcttgagacaaatggcagtattcatccacaattttaaaagaaaaggggggattggggggtacagtgcaggggaaagaatagtagacataatagcaacagacatacaaactaaag

SEQ ID NO: 20751 - DNA, 301 bp, Artificial Sequence
  NTC.49_NTC.39
  crRNA array
  misc_feature (148)..(157): n is a, c, g, or t
cttggctttatatatcttgtggaaaggacgaaacaccgtaatttctactaagtgtagattcggggcgcgtcaactgaattaatttctactaagtgtagatccggacgttataacgtttcttaatttctactaagtgtagatttttttnnnnnnnnnnaagcttggcgtggatccgatatcaactagatcttgagacaaatggcagtattcatccacaattttaaaagaaaaggggggattggggggtacagtgcaggggaaagaatagtagacataatagcaacagacatacaaactaaag

SEQ ID NO: 20752 - DNA, 301 bp, Artificial Sequence
  NTC.49_NTC.29
  crRNA array
  misc_feature (148)..(157): n is a, c, g, or t
cttggctttatatatcttgtggaaaggacgaaacaccgtaatttctactaagtgtagattcggggcgcgtcaactgaattaatttctactaagtgtagatcgcgatctataccgtctatataatttctactaagtgtagatttttttnnnnnnnnnnaagcttggcgtggatccgatatcaactagatcttgagacaaatggcagtattcatccacaattttaaaagaaaaggggggattggggggtacagtgcaggggaaagaatagtagacataatagcaacagacatacaaactaaag

SEQ ID NO: 20753 - DNA, 301 bp, Artificial Sequence
  NTC.49_NTC.25
  crRNA array
  misc_feature (148)..(157): n is a, c, g, or t
cttggctttatatatcttgtggaaaggacgaaacaccgtaatttctactaagtgtagattcggggcgcgtcaactgaattaatttctactaagtgtagattcgcgttatcgtgccgtgcgtaatttctactaagtgtagatttttttnnnnnnnnnnaagcttggcgtggatccgatatcaactagatcttgagacaaatggcagtattcatccacaattttaaaagaaaaggggggattggggggtacagtgcaggggaaagaatagtagacataatagcaacagacatacaaactaaag

SEQ ID NO: 20754 - DNA, 301 bp, Artificial Sequence
  NTC.49_NTC.3
  crRNA array
  misc_feature (148)..(157): n is a, c, g, or t
cttggctttatatatcttgtggaaaggacgaaacaccgtaatttctactaagtgtagattcggggcgcgtcaactgaattaatttctactaagtgtagattcgacgcgagacgacgtacataatttctactaagtgtagatttttttnnnnnnnnnnaagcttggcgtggatccgatatcaactagatcttgagacaaatggcagtattcatccacaattttaaaagaaaaggggggattggggggtacagtgcaggggaaagaatagtagacataatagcaacagacatacaaactaaag

SEQ ID NO: 20755 - DNA, 301 bp, Artificial Sequence
  NTC.49_NTC.47
  crRNA array
  misc_feature (148)..(157): n is a, c, g, or t
cttggctttatatatcttgtggaaaggacgaaacaccgtaatttctactaagtgtagattcggggcgcgtcaactgaattaatttctactaagtgtagattctcgtatcgcgattgttaataatttctactaagtgtagatttttttnnnnnnnnnnaagcttggcgtggatccgatatcaactagatcttgagacaaatggcagtattcatccacaattttaaaagaaaaggggggattggggggtacagtgcaggggaaagaatagtagacataatagcaacagacatacaaactaaag

SEQ ID NO: 20756 - DNA, 301 bp, Artificial Sequence
  NTC.49_NTC.32
  crRNA array
  misc_feature (148)..(157): n is a, c, g, or t
cttggctttatatatcttgtggaaaggacgaaacaccgtaatttctactaagtgtagattcggggcgcgtcaactgaattaatttctactaagtgtagatgcacgttacgcccgggtcactaatttctactaagtgtagatttttttnnnnnnnnnnaagcttggcgtggatccgatatcaactagatcttgagacaaatggcagtattcatccacaattttaaaagaaaaggggggattggggggtacagtgcaggggaaagaatagtagacataatagcaacagacatacaaactaaag

SEQ ID NO: 20757 - DNA, 301 bp, Artificial Sequence
  NTC.49_NTC.40
  crRNA array
  misc_feature (148)..(157): n is a, c, g, or t
cttggctttatatatcttgtggaaaggacgaaacaccgtaatttctactaagtgtagattcggggcgcgtcaactgaattaatttctactaagtgtagatattcgcgaacccggccggaataatttctactaagtgtagatttttttnnnnnnnnnnaagcttggcgtggatccgatatcaactagatcttgagacaaatggcagtattcatccacaattttaaaagaaaaggggggattggggggtacagtgcaggggaaagaatagtagacataatagcaacagacatacaaactaaag

SEQ ID NO: 20758 - DNA, 301 bp, Artificial Sequence
  NTC.49_NTC.5
  crRNA array
  misc_feature (148)..(157): n is a, c, g, or t
cttggctttatatatcttgtggaaaggacgaaacaccgtaatttctactaagtgtagattcggggcgcgtcaactgaattaatttctactaagtgtagatgcttacgcgtcgcgaatgtataatttctactaagtgtagatttttttnnnnnnnnnnaagcttggcgtggatccgatatcaactagatcttgagacaaatggcagtattcatccacaattttaaaagaaaaggggggattggggggtacagtgcaggggaaagaatagtagacataatagcaacagacatacaaactaaag

SEQ ID NO: 20759 - DNA, 301 bp, Artificial Sequence
  NTC.49_NTC.33
  crRNA array
  misc_feature (148)..(157): n is a, c, g, or t
cttggctttatatatcttgtggaaaggacgaaacaccgtaatttctactaagtgtagattcggggcgcgtcaactgaattaatttctactaagtgtagattaagcgaccgacgcattcgctaatttctactaagtgtagatttttttnnnnnnnnnnaagcttggcgtggatccgatatcaactagatcttgagacaaatggcagtattcatccacaattttaaaagaaaaggggggattggggggtacagtgcaggggaaagaatagtagacataatagcaacagacatacaaactaaag

SEQ ID NO: 20760 - DNA, 301 bp, Artificial Sequence
  NTC.49_NTC.1
  crRNA array
  misc_feature (148)..(157): n is a, c, g, or t
cttggctttatatatcttgtggaaaggacgaaacaccgtaatttctactaagtgtagattcggggcgcgtcaactgaattaatttctactaagtgtagatcgcgtaaccgttccggctcctaatttctactaagtgtagatttttttnnnnnnnnnnaagcttggcgtggatccgatatcaactagatcttgagacaaatggcagtattcatccacaattttaaaagaaaaggggggattggggggtacagtgcaggggaaagaatagtagacataatagcaacagacatacaaactaaag

SEQ ID NO: 20761 - DNA, 301 bp, Artificial Sequence
  NTC.49_NTC.6
  crRNA array
  misc_feature (148)..(157): n is a, c, g, or t
cttggctttatatatcttgtggaaaggacgaaacaccgtaatttctactaagtgtagattcggggcgcgtcaactgaattaatttctactaagtgtagatcgaatcgcgcctacgggaattaatttctactaagtgtagatttttttnnnnnnnnnnaagcttggcgtggatccgatatcaactagatcttgagacaaatggcagtattcatccacaattttaaaagaaaaggggggattggggggtacagtgcaggggaaagaatagtagacataatagcaacagacatacaaactaaag

SEQ ID NO: 20762 - DNA, 301 bp, Artificial Sequence
  NTC.49_NTC.38
  crRNA array
  misc_feature (148)..(157): n is a, c, g, or t
cttggctttatatatcttgtggaaaggacgaaacaccgtaatttctactaagtgtagattcggggcgcgtcaactgaattaatttctactaagtgtagataacggagcgcgatactaccataatttctactaagtgtagatttttttnnnnnnnnnnaagcttggcgtggatccgatatcaactagatcttgagacaaatggcagtattcatccacaattttaaaagaaaaggggggattggggggtacagtgcaggggaaagaatagtagacataatagcaacagacatacaaactaaag

SEQ ID NO: 20763 - DNA, 301 bp, Artificial Sequence
  NTC.49_NTC.41
  crRNA array
  misc_feature (148)..(157): n is a, c, g, or t
cttggctttatatatcttgtggaaaggacgaaacaccgtaatttctactaagtgtagattcggggcgcgtcaactgaattaatttctactaagtgtagatttgatggcgcgacgcgttattaatttctactaagtgtagatttttttnnnnnnnnnnaagcttggcgtggatccgatatcaactagatcttgagacaaatggcagtattcatccacaattttaaaagaaaaggggggattggggggtacagtgcaggggaaagaatagtagacataatagcaacagacatacaaactaaag

SEQ ID NO: 20764 - DNA, 301 bp, Artificial Sequence
  NTC.49_NTC.18
  crRNA array
  misc_feature (148)..(157): n is a, c, g, or t
cttggctttatatatcttgtggaaaggacgaaacaccgtaatttctactaagtgtagattcggggcgcgtcaactgaattaatttctactaagtgtagattccggttacgaccggcaaaataatttctactaagtgtagatttttttnnnnnnnnnnaagcttggcgtggatccgatatcaactagatcttgagacaaatggcagtattcatccacaattttaaaagaaaaggggggattggggggtacagtgcaggggaaagaatagtagacataatagcaacagacatacaaactaaag

SEQ ID NO: 20765 - DNA, 301 bp, Artificial Sequence
  NTC.49_NTC.24
  crRNA array
  misc_feature (148)..(157): n is a, c, g, or t
cttggctttatatatcttgtggaaaggacgaaacaccgtaatttctactaagtgtagattcggggcgcgtcaactgaattaatttctactaagtgtagatactatcgacgttcgtcccggtaatttctactaagtgtagatttttttnnnnnnnnnnaagcttggcgtggatccgatatcaactagatcttgagacaaatggcagtattcatccacaattttaaaagaaaaggggggattggggggtacagtgcaggggaaagaatagtagacataatagcaacagacatacaaactaaag

SEQ ID NO: 20766 - DNA, 301 bp, Artificial Sequence
  NTC.49_NTC.31
  crRNA array
  misc_feature (148)..(157): n is a, c, g, or t
cttggctttatatatcttgtggaaaggacgaaacaccgtaatttctactaagtgtagattcggggcgcgtcaactgaattaatttctactaagtgtagatgccgaccgcgtgattgtaggtaatttctactaagtgtagatttttttnnnnnnnnnnaagcttggcgtggatccgatatcaactagatcttgagacaaatggcagtattcatccacaattttaaaagaaaaggggggattggggggtacagtgcaggggaaagaatagtagacataatagcaacagacatacaaactaaag

SEQ ID NO: 20767 - DNA, 301 bp, Artificial Sequence
  NTC.49_NTC.51
  crRNA array
  misc_feature (148)..(157): n is a, c, g, or t
cttggctttatatatcttgtggaaaggacgaaacaccgtaatttctactaagtgtagattcggggcgcgtcaactgaattaatttctactaagtgtagattaacgcgcaacacgccaatgtaatttctactaagtgtagatttttttnnnnnnnnnnaagcttggcgtggatccgatatcaactagatcttgagacaaatggcagtattcatccacaattttaaaagaaaaggggggattggggggtacagtgcaggggaaagaatagtagacataatagcaacagacatacaaactaaag

SEQ ID NO: 20768 - DNA, 301 bp, Artificial Sequence
  NTC.49_NTC.23
  crRNA array
  misc_feature (148)..(157): n is a, c, g, or t
cttggctttatatatcttgtggaaaggacgaaacaccgtaatttctactaagtgtagattcggggcgcgtcaactgaattaatttctactaagtgtagatacgcgctattatcgtaggtgtaatttctactaagtgtagatttttttnnnnnnnnnnaagcttggcgtggatccgatatcaactagatcttgagacaaatggcagtattcatccacaattttaaaagaaaaggggggattggggggtacagtgcaggggaaagaatagtagacataatagcaacagacatacaaactaaag

SEQ ID NO: 20769 - DNA, 301 bp, Artificial Sequence
  NTC.49_NTC.36
  crRNA array
  misc_feature (148)..(157): n is a, c, g, or t
cttggctttatatatcttgtggaaaggacgaaacaccgtaatttctactaagtgtagattcggggcgcgtcaactgaattaatttctactaagtgtagatcaacccgccgtagcgggccttaatttctactaagtgtagatttttttnnnnnnnnnnaagcttggcgtggatccgatatcaactagatcttgagacaaatggcagtattcatccacaattttaaaagaaaaggggggattggggggtacagtgcaggggaaagaatagtagacataatagcaacagacatacaaactaaag

SEQ ID NO: 20770 - DNA, 301 bp, Artificial Sequence
  NTC.49_NTC.15
  crRNA array
  misc_feature (148)..(157): n is a, c, g, or t
cttggctttatatatcttgtggaaaggacgaaacaccgtaatttctactaagtgtagattcggggcgcgtcaactgaattaatttctactaagtgtagatgttgtcgtgccgcgaatttataatttctactaagtgtagatttttttnnnnnnnnnnaagcttggcgtggatccgatatcaactagatcttgagacaaatggcagtattcatccacaattttaaaagaaaaggggggattggggggtacagtgcaggggaaagaatagtagacataatagcaacagacatacaaactaaag

SEQ ID NO: 20771 - DNA, 301 bp, Artificial Sequence
  NTC.49_NTC.45
  crRNA array
  misc_feature (148)..(157): n is a, c, g, or t
cttggctttatatatcttgtggaaaggacgaaacaccgtaatttctactaagtgtagattcggggcgcgtcaactgaattaatttctactaagtgtagatcggaacgcgtgatactagggtaatttctactaagtgtagatttttttnnnnnnnnnnaagcttggcgtggatccgatatcaactagatcttgagacaaatggcagtattcatccacaattttaaaagaaaaggggggattggggggtacagtgcaggggaaagaatagtagacataatagcaacagacatacaaactaaag

SEQ ID NO: 20772 - DNA, 301 bp, Artificial Sequence
  NTC.49_NTC.12
  crRNA array
  misc_feature (148)..(157): n is a, c, g, or t
cttggctttatatatcttgtggaaaggacgaaacaccgtaatttctactaagtgtagattcggggcgcgtcaactgaattaatttctactaagtgtagatcgccgacgattaatcaatagtaatttctactaagtgtagatttttttnnnnnnnnnnaagcttggcgtggatccgatatcaactagatcttgagacaaatggcagtattcatccacaattttaaaagaaaaggggggattggggggtacagtgcaggggaaagaatagtagacataatagcaacagacatacaaactaaag

SEQ ID NO: 20773 - DNA, 301 bp, Artificial Sequence
  NTC.49_NTC.19
  crRNA array
  misc_feature (148)..(157): n is a, c, g, or t
cttggctttatatatcttgtggaaaggacgaaacaccgtaatttctactaagtgtagattcggggcgcgtcaactgaattaatttctactaagtgtagatcgtcgtagaacgatacccgataatttctactaagtgtagatttttttnnnnnnnnnnaagcttggcgtggatccgatatcaactagatcttgagacaaatggcagtattcatccacaattttaaaagaaaaggggggattggggggtacagtgcaggggaaagaatagtagacataatagcaacagacatacaaactaaag

SEQ ID NO: 20774 - DNA, 301 bp, Artificial Sequence
  NTC.49_NTC.20
  crRNA array
  misc_feature (148)..(157): n is a, c, g, or t
cttggctttatatatcttgtggaaaggacgaaacaccgtaatttctactaagtgtagattcggggcgcgtcaactgaattaatttctactaagtgtagatattccggcgcgaccagaagataatttctactaagtgtagatttttttnnnnnnnnnnaagcttggcgtggatccgatatcaactagatcttgagacaaatggcagtattcatccacaattttaaaagaaaaggggggattggggggtacagtgcaggggaaagaatagtagacataatagcaacagacatacaaactaaag

SEQ ID NO: 20775 - DNA, 301 bp, Artificial Sequence
  NTC.49_NTC.48
  crRNA array
  misc_feature (148)..(157): n is a, c, g, or t
cttggctttatatatcttgtggaaaggacgaaacaccgtaatttctactaagtgtagattcggggcgcgtcaactgaattaatttctactaagtgtagatcggtcgactacggctgttagtaatttctactaagtgtagatttttttnnnnnnnnnnaagcttggcgtggatccgatatcaactagatcttgagacaaatggcagtattcatccacaattttaaaagaaaaggggggattggggggtacagtgcaggggaaagaatagtagacataatagcaacagacatacaaactaaag

SEQ ID NO: 20776 - DNA, 301 bp, Artificial Sequence
  NTC.49_NTC.26
  crRNA array
  misc_feature (148)..(157): n is a, c, g, or t
cttggctttatatatcttgtggaaaggacgaaacaccgtaatttctactaagtgtagattcggggcgcgtcaactgaattaatttctactaagtgtagatcgcgacggcggttttaacactaatttctactaagtgtagatttttttnnnnnnnnnnaagcttggcgtggatccgatatcaactagatcttgagacaaatggcagtattcatccacaattttaaaagaaaaggggggattggggggtacagtgcaggggaaagaatagtagacataatagcaacagacatacaaactaaag

SEQ ID NO: 20777 - DNA, 301 bp, Artificial Sequence
  NTC.49_NTC.27
  crRNA array
  misc_feature (148)..(157): n is a, c, g, or t
cttggctttatatatcttgtggaaaggacgaaacaccgtaatttctactaagtgtagattcggggcgcgtcaactgaattaatttctactaagtgtagatgtcgcgttgcgaccggcgcttaatttctactaagtgtagatttttttnnnnnnnnnnaagcttggcgtggatccgatatcaactagatcttgagacaaatggcagtattcatccacaattttaaaagaaaaggggggattggggggtacagtgcaggggaaagaatagtagacataatagcaacagacatacaaactaaag

SEQ ID NO: 20778 - DNA, 301 bp, Artificial Sequence
  NTC.49_NTC.34
  crRNA array
  misc_feature (148)..(157): n is a, c, g, or t
cttggctttatatatcttgtggaaaggacgaaacaccgtaatttctactaagtgtagattcggggcgcgtcaactgaattaatttctactaagtgtagattagcgttcgacacgtgaaactaatttctactaagtgtagatttttttnnnnnnnnnnaagcttggcgtggatccgatatcaactagatcttgagacaaatggcagtattcatccacaattttaaaagaaaaggggggattggggggtacagtgcaggggaaagaatagtagacataatagcaacagacatacaaactaaag

SEQ ID NO: 20779 - DNA, 301 bp, Artificial Sequence
  NTC.49_NTC.16
  crRNA array
  misc_feature (148)..(157): n is a, c, g, or t
cttggctttatatatcttgtggaaaggacgaaacaccgtaatttctactaagtgtagattcggggcgcgtcaactgaattaatttctactaagtgtagatcggtacgttagacgaaaatttaatttctactaagtgtagatttttttnnnnnnnnnnaagcttggcgtggatccgatatcaactagatcttgagacaaatggcagtattcatccacaattttaaaagaaaaggggggattggggggtacagtgcaggggaaagaatagtagacataatagcaacagacatacaaactaaag

SEQ ID NO: 20780 - DNA, 301 bp, Artificial Sequence
  NTC.49_NTC.4
  crRNA array
  misc_feature (148)..(157): n is a, c, g, or t
cttggctttatatatcttgtggaaaggacgaaacaccgtaatttctactaagtgtagattcggggcgcgtcaactgaattaatttctactaagtgtagatatacccgtcgcgaacgtgagtaatttctactaagtgtagatttttttnnnnnnnnnnaagcttggcgtggatccgatatcaactagatcttgagacaaatggcagtattcatccacaattttaaaagaaaaggggggattggggggtacagtgcaggggaaagaatagtagacataatagcaacagacatacaaactaaag

SEQ ID NO: 20781 - DNA, 301 bp, Artificial Sequence
  NTC.49_NTC.42
  crRNA array
  misc_feature (148)..(157): n is a, c, g, or t
cttggctttatatatcttgtggaaaggacgaaacaccgtaatttctactaagtgtagattcggggcgcgtcaactgaattaatttctactaagtgtagatggtcaaatcgcggcgataactaatttctactaagtgtagatttttttnnnnnnnnnnaagcttggcgtggatccgatatcaactagatcttgagacaaatggcagtattcatccacaattttaaaagaaaaggggggattggggggtacagtgcaggggaaagaatagtagacataatagcaacagacatacaaactaaag

SEQ ID NO: 20782 - DNA, 301 bp, Artificial Sequence
  NTC.49_NTC.22
  crRNA array
  misc_feature (148)..(157): n is a, c, g, or t
cttggctttatatatcttgtggaaaggacgaaacaccgtaatttctactaagtgtagattcggggcgcgtcaactgaattaatttctactaagtgtagatgcgcgtcaacgtaatgtgcctaatttctactaagtgtagatttttttnnnnnnnnnnaagcttggcgtggatccgatatcaactagatcttgagacaaatggcagtattcatccacaattttaaaagaaaaggggggattggggggtacagtgcaggggaaagaatagtagacataatagcaacagacatacaaactaaag

SEQ ID NO: 20783 - DNA, 301 bp, Artificial Sequence
  NTC.49_NTC.17
  crRNA array
  misc_feature (148)..(157): n is a, c, g, or t
cttggctttatatatcttgtggaaaggacgaaacaccgtaatttctactaagtgtagattcggggcgcgtcaactgaattaatttctactaagtgtagattatcgaacgctatcgaacgttaatttctactaagtgtagatttttttnnnnnnnnnnaagcttggcgtggatccgatatcaactagatcttgagacaaatggcagtattcatccacaattttaaaagaaaaggggggattggggggtacagtgcaggggaaagaatagtagacataatagcaacagacatacaaactaaag

SEQ ID NO: 20784 - DNA, 301 bp, Artificial Sequence
  NTC.49_NTC.9
  crRNA array
  misc_feature (148)..(157): n is a, c, g, or t
cttggctttatatatcttgtggaaaggacgaaacaccgtaatttctactaagtgtagattcggggcgcgtcaactgaattaatttctactaagtgtagatatcgccgtacggctatggcataatttctactaagtgtagatttttttnnnnnnnnnnaagcttggcgtggatccgatatcaactagatcttgagacaaatggcagtattcatccacaattttaaaagaaaaggggggattggggggtacagtgcaggggaaagaatagtagacataatagcaacagacatacaaactaaag

SEQ ID NO: 20785 - DNA, 301 bp, Artificial Sequence
  NTC.49_NTC.30
  crRNA array
  misc_feature (148)..(157): n is a, c, g, or t
cttggctttatatatcttgtggaaaggacgaaacaccgtaatttctactaagtgtagattcggggcgcgtcaactgaattaatttctactaagtgtagatcgatcgtacgggtgtcctaataatttctactaagtgtagatttttttnnnnnnnnnnaagcttggcgtggatccgatatcaactagatcttgagacaaatggcagtattcatccacaattttaaaagaaaaggggggattggggggtacagtgcaggggaaagaatagtagacataatagcaacagacatacaaactaaag

SEQ ID NO: 20786 - DNA, 301 bp, Artificial Sequence
  NTC.49_NTC.8
  crRNA array
  misc_feature (148)..(157): n is a, c, g, or t
cttggctttatatatcttgtggaaaggacgaaacaccgtaatttctactaagtgtagattcggggcgcgtcaactgaattaatttctactaagtgtagatcgaccgaggttacgctgggataatttctactaagtgtagatttttttnnnnnnnnnnaagcttggcgtggatccgatatcaactagatcttgagacaaatggcagtattcatccacaattttaaaagaaaaggggggattggggggtacagtgcaggggaaagaatagtagacataatagcaacagacatacaaactaaag

SEQ ID NO: 20787 - DNA, 301 bp, Artificial Sequence
  NTC.49_NTC.46
  crRNA array
  misc_feature (148)..(157): n is a, c, g, or t
cttggctttatatatcttgtggaaaggacgaaacaccgtaatttctactaagtgtagattcggggcgcgtcaactgaattaatttctactaagtgtagatagcgggtcgtagacgcgcggtaatttctactaagtgtagatttttttnnnnnnnnnnaagcttggcgtggatccgatatcaactagatcttgagacaaatggcagtattcatccacaattttaaaagaaaaggggggattggggggtacagtgcaggggaaagaatagtagacataatagcaacagacatacaaactaaag

SEQ ID NO: 20788 - DNA, 301 bp, Artificial Sequence
  NTC.49_NTC.35
  crRNA array
  misc_feature (148)..(157): n is a, c, g, or t
cttggctttatatatcttgtggaaaggacgaaacaccgtaatttctactaagtgtagattcggggcgcgtcaactgaattaatttctactaagtgtagattggcgcgtaatcgctattcgtaatttctactaagtgtagatttttttnnnnnnnnnnaagcttggcgtggatccgatatcaactagatcttgagacaaatggcagtattcatccacaattttaaaagaaaaggggggattggggggtacagtgcaggggaaagaatagtagacataatagcaacagacatacaaactaaag

SEQ ID NO: 20789 - DNA, 301 bp, Artificial Sequence
  NTC.49_NTC.10
  crRNA array
  misc_feature (148)..(157): n is a, c, g, or t
cttggctttatatatcttgtggaaaggacgaaacaccgtaatttctactaagtgtagattcggggcgcgtcaactgaattaatttctactaagtgtagatcgctaagttcgcgcgggccgtaatttctactaagtgtagatttttttnnnnnnnnnnaagcttggcgtggatccgatatcaactagatcttgagacaaatggcagtattcatccacaattttaaaagaaaaggggggattggggggtacagtgcaggggaaagaatagtagacataatagcaacagacatacaaactaaag

SEQ ID NO: 20790 - DNA, 301 bp, Artificial Sequence
  NTC.49_NTC.11
  crRNA array
  misc_feature (148)..(157): n is a, c, g, or t
cttggctttatatatcttgtggaaaggacgaaacaccgtaatttctactaagtgtagattcggggcgcgtcaactgaattaatttctactaagtgtagatcgttcgtcgacgaagcaatctaatttctactaagtgtagatttttttnnnnnnnnnnaagcttggcgtggatccgatatcaactagatcttgagacaaatggcagtattcatccacaattttaaaagaaaaggggggattggggggtacagtgcaggggaaagaatagtagacataatagcaacagacatacaaactaaag

SEQ ID NO: 20791 - DNA, 301 bp, Artificial Sequence
  NTC.49_NTC.14
  crRNA array
  misc_feature (148)..(157): n is a, c, g, or t
cttggctttatatatcttgtggaaaggacgaaacaccgtaatttctactaagtgtagattcggggcgcgtcaactgaattaatttctactaagtgtagatccgttcgtgcgatagtgttttaatttctactaagtgtagatttttttnnnnnnnnnnaagcttggcgtggatccgatatcaactagatcttgagacaaatggcagtattcatccacaattttaaaagaaaaggggggattggggggtacagtgcaggggaaagaatagtagacataatagcaacagacatacaaactaaag

SEQ ID NO: 20792 - DNA, 301 bp, Artificial Sequence
  NTC.49_NTC.28
  crRNA array
  misc_feature (148)..(157): n is a, c, g, or t
cttggctttatatatcttgtggaaaggacgaaacaccgtaatttctactaagtgtagattcggggcgcgtcaactgaattaatttctactaagtgtagataccgctaatcggcgtaaacttaatttctactaagtgtagatttttttnnnnnnnnnnaagcttggcgtggatccgatatcaactagatcttgagacaaatggcagtattcatccacaattttaaaagaaaaggggggattggggggtacagtgcaggggaaagaatagtagacataatagcaacagacatacaaactaaag

SEQ ID NO: 20793 - DNA, 301 bp, Artificial Sequence
  NTC.50_NTC.39
  crRNA array
  misc_feature (148)..(157): n is a, c, g, or t
cttggctttatatatcttgtggaaaggacgaaacaccgtaatttctactaagtgtagatattgccgctcgcgcaaaatctaatttctactaagtgtagatccggacgttataacgtttcttaatttctactaagtgtagatttttttnnnnnnnnnnaagcttggcgtggatccgatatcaactagatcttgagacaaatggcagtattcatccacaattttaaaagaaaaggggggattggggggtacagtgcaggggaaagaatagtagacataatagcaacagacatacaaactaaag

SEQ ID NO: 20794 - DNA, 301 bp, Artificial Sequence
  NTC.50_NTC.29
  crRNA array
  misc_feature (148)..(157): n is a, c, g, or t
cttggctttatatatcttgtggaaaggacgaaacaccgtaatttctactaagtgtagatattgccgctcgcgcaaaatctaatttctactaagtgtagatcgcgatctataccgtctatataatttctactaagtgtagatttttttnnnnnnnnnnaagcttggcgtggatccgatatcaactagatcttgagacaaatggcagtattcatccacaattttaaaagaaaaggggggattggggggtacagtgcaggggaaagaatagtagacataatagcaacagacatacaaactaaag

SEQ ID NO: 20795 - DNA, 301 bp, Artificial Sequence
  NTC.50_NTC.25
  crRNA array
  misc_feature (148)..(157): n is a, c, g, or t
cttggctttatatatcttgtggaaaggacgaaacaccgtaatttctactaagtgtagatattgccgctcgcgcaaaatctaatttctactaagtgtagattcgcgttatcgtgccgtgcgtaatttctactaagtgtagatttttttnnnnnnnnnnaagcttggcgtggatccgatatcaactagatcttgagacaaatggcagtattcatccacaattttaaaagaaaaggggggattggggggtacagtgcaggggaaagaatagtagacataatagcaacagacatacaaactaaag

SEQ ID NO: 20796 - DNA, 301 bp, Artificial Sequence
  NTC.50_NTC.3
  crRNA array
  misc_feature (148)..(157): n is a, c, g, or t
cttggctttatatatcttgtggaaaggacgaaacaccgtaatttctactaagtgtagatattgccgctcgcgcaaaatctaatttctactaagtgtagattcgacgcgagacgacgtacataatttctactaagtgtagatttttttnnnnnnnnnnaagcttggcgtggatccgatatcaactagatcttgagacaaatggcagtattcatccacaattttaaaagaaaaggggggattggggggtacagtgcaggggaaagaatagtagacataatagcaacagacatacaaactaaag

SEQ ID NO: 20797 - DNA, 301 bp, Artificial Sequence
  NTC.50_NTC.47
  crRNA array
  misc_feature (148)..(157): n is a, c, g, or t
cttggctttatatatcttgtggaaaggacgaaacaccgtaatttctactaagtgtagatattgccgctcgcgcaaaatctaatttctactaagtgtagattctcgtatcgcgattgttaataatttctactaagtgtagatttttttnnnnnnnnnnaagcttggcgtggatccgatatcaactagatcttgagacaaatggcagtattcatccacaattttaaaagaaaaggggggattggggggtacagtgcaggggaaagaatagtagacataatagcaacagacatacaaactaaag

SEQ ID NO: 20798 - DNA, 301 bp, Artificial Sequence
  NTC.50_NTC.32
  crRNA array
  misc_feature (148)..(157): n is a, c, g, or t
cttggctttatatatcttgtggaaaggacgaaacaccgtaatttctactaagtgtagatattgccgctcgcgcaaaatctaatttctactaagtgtagatgcacgttacgcccgggtcactaatttctactaagtgtagatttttttnnnnnnnnnnaagcttggcgtggatccgatatcaactagatcttgagacaaatggcagtattcatccacaattttaaaagaaaaggggggattggggggtacagtgcaggggaaagaatagtagacataatagcaacagacatacaaactaaag

SEQ ID NO: 20799 - DNA, 301 bp, Artificial Sequence
  NTC.50_NTC.40
  crRNA array
  misc_feature (148)..(157): n is a, c, g, or t
cttggctttatatatcttgtggaaaggacgaaacaccgtaatttctactaagtgtagatattgccgctcgcgcaaaatctaatttctactaagtgtagatattcgcgaacccggccggaataatttctactaagtgtagatttttttnnnnnnnnnnaagcttggcgtggatccgatatcaactagatcttgagacaaatggcagtattcatccacaattttaaaagaaaaggggggattggggggtacagtgcaggggaaagaatagtagacataatagcaacagacatacaaactaaag

SEQ ID NO: 20800 - DNA, 301 bp, Artificial Sequence
  NTC.50_NTC.5
  crRNA array
  misc_feature (148)..(157): n is a, c, g, or t
cttggctttatatatcttgtggaaaggacgaaacaccgtaatttctactaagtgtagatattgccgctcgcgcaaaatctaatttctactaagtgtagatgcttacgcgtcgcgaatgtataatttctactaagtgtagatttttttnnnnnnnnnnaagcttggcgtggatccgatatcaactagatcttgagacaaatggcagtattcatccacaattttaaaagaaaaggggggattggggggtacagtgcaggggaaagaatagtagacataatagcaacagacatacaaactaaag

SEQ ID NO: 20801 - DNA, 301 bp, Artificial Sequence
  NTC.50_NTC.33
  crRNA array
  misc_feature (148)..(157): n is a, c, g, or t
cttggctttatatatcttgtggaaaggacgaaacaccgtaatttctactaagtgtagatattgccgctcgcgcaaaatctaatttctactaagtgtagattaagcgaccgacgcattcgctaatttctactaagtgtagatttttttnnnnnnnnnnaagcttggcgtggatccgatatcaactagatcttgagacaaatggcagtattcatccacaattttaaaagaaaaggggggattggggggtacagtgcaggggaaagaatagtagacataatagcaacagacatacaaactaaag

SEQ ID NO: 20802 - DNA, 301 bp, Artificial Sequence
  NTC.50_NTC.1
  crRNA array
  misc_feature (148)..(157): n is a, c, g, or t
cttggctttatatatcttgtggaaaggacgaaacaccgtaatttctactaagtgtagatattgccgctcgcgcaaaatctaatttctactaagtgtagatcgcgtaaccgttccggctcctaatttctactaagtgtagatttttttnnnnnnnnnnaagcttggcgtggatccgatatcaactagatcttgagacaaatggcagtattcatccacaattttaaaagaaaaggggggattggggggtacagtgcaggggaaagaatagtagacataatagcaacagacatacaaactaaag

SEQ ID NO: 20803 - DNA, 301 bp, Artificial Sequence
  NTC.50_NTC.6
  crRNA array
  misc_feature (148)..(157): n is a, c, g, or t
cttggctttatatatcttgtggaaaggacgaaacaccgtaatttctactaagtgtagatattgccgctcgcgcaaaatctaatttctactaagtgtagatcgaatcgcgcctacgggaattaatttctactaagtgtagatttttttnnnnnnnnnnaagcttggcgtggatccgatatcaactagatcttgagacaaatggcagtattcatccacaattttaaaagaaaaggggggattggggggtacagtgcaggggaaagaatagtagacataatagcaacagacatacaaactaaag

SEQ ID NO: 20804 - DNA, 301 bp, Artificial Sequence
  NTC.50_NTC.38
  crRNA array
  misc_feature (148)..(157): n is a, c, g, or t
cttggctttatatatcttgtggaaaggacgaaacaccgtaatttctactaagtgtagatattgccgctcgcgcaaaatctaatttctactaagtgtagataacggagcgcgatactaccataatttctactaagtgtagatttttttnnnnnnnnnnaagcttggcgtggatccgatatcaactagatcttgagacaaatggcagtattcatccacaattttaaaagaaaaggggggattggggggtacagtgcaggggaaagaatagtagacataatagcaacagacatacaaactaaag

SEQ ID NO: 20805 - DNA, 301 bp, Artificial Sequence
  NTC.50_NTC.41
  crRNA array
  misc_feature (148)..(157): n is a, c, g, or t
cttggctttatatatcttgtggaaaggacgaaacaccgtaatttctactaagtgtagatattgccgctcgcgcaaaatctaatttctactaagtgtagatttgatggcgcgacgcgttattaatttctactaagtgtagatttttttnnnnnnnnnnaagcttggcgtggatccgatatcaactagatcttgagacaaatggcagtattcatccacaattttaaaagaaaaggggggattggggggtacagtgcaggggaaagaatagtagacataatagcaacagacatacaaactaaag

SEQ ID NO: 20806 - DNA, 301 bp, Artificial Sequence
  NTC.50_NTC.18
  crRNA array
  misc_feature (148)..(157): n is a, c, g, or t
cttggctttatatatcttgtggaaaggacgaaacaccgtaatttctactaagtgtagatattgccgctcgcgcaaaatctaatttctactaagtgtagattccggttacgaccggcaaaataatttctactaagtgtagatttttttnnnnnnnnnnaagcttggcgtggatccgatatcaactagatcttgagacaaatggcagtattcatccacaattttaaaagaaaaggggggattggggggtacagtgcaggggaaagaatagtagacataatagcaacagacatacaaactaaag

SEQ ID NO: 20807 - DNA, 301 bp, Artificial Sequence
  NTC.50_NTC.24
  crRNA array
  misc_feature (148)..(157): n is a, c, g, or t
cttggctttatatatcttgtggaaaggacgaaacaccgtaatttctactaagtgtagatattgccgctcgcgcaaaatctaatttctactaagtgtagatactatcgacgttcgtcccggtaatttctactaagtgtagatttttttnnnnnnnnnnaagcttggcgtggatccgatatcaactagatcttgagacaaatggcagtattcatccacaattttaaaagaaaaggggggattggggggtacagtgcaggggaaagaatagtagacataatagcaacagacatacaaactaaag

SEQ ID NO: 20808 - DNA, 301 bp, Artificial Sequence
  NTC.50_NTC.31
  crRNA array
  misc_feature (148)..(157): n is a, c, g, or t
cttggctttatatatcttgtggaaaggacgaaacaccgtaatttctactaagtgtagatattgccgctcgcgcaaaatctaatttctactaagtgtagatgccgaccgcgtgattgtaggtaatttctactaagtgtagatttttttnnnnnnnnnnaagcttggcgtggatccgatatcaactagatcttgagacaaatggcagtattcatccacaattttaaaagaaaaggggggattggggggtacagtgcaggggaaagaatagtagacataatagcaacagacatacaaactaaag

SEQ ID NO: 20809 - DNA, 301 bp, Artificial Sequence
  NTC.50_NTC.51
  crRNA array
  misc_feature (148)..(157): n is a, c, g, or t
cttggctttatatatcttgtggaaaggacgaaacaccgtaatttctactaagtgtagatattgccgctcgcgcaaaatctaatttctactaagtgtagattaacgcgcaacacgccaatgtaatttctactaagtgtagatttttttnnnnnnnnnnaagcttggcgtggatccgatatcaactagatcttgagacaaatggcagtattcatccacaattttaaaagaaaaggggggattggggggtacagtgcaggggaaagaatagtagacataatagcaacagacatacaaactaaag

SEQ ID NO: 20810 - DNA, 301 bp, Artificial Sequence
  NTC.50_NTC.23
  crRNA array
  misc_feature (148)..(157): n is a, c, g, or t
cttggctttatatatcttgtggaaaggacgaaacaccgtaatttctactaagtgtagatattgccgctcgcgcaaaatctaatttctactaagtgtagatacgcgctattatcgtaggtgtaatttctactaagtgtagatttttttnnnnnnnnnnaagcttggcgtggatccgatatcaactagatcttgagacaaatggcagtattcatccacaattttaaaagaaaaggggggattggggggtacagtgcaggggaaagaatagtagacataatagcaacagacatacaaactaaag

SEQ ID NO: 20811 - DNA, 301 bp, Artificial Sequence
  NTC.50_NTC.36
  crRNA array
  misc_feature (148)..(157): n is a, c, g, or t
cttggctttatatatcttgtggaaaggacgaaacaccgtaatttctactaagtgtagatattgccgctcgcgcaaaatctaatttctactaagtgtagatcaacccgccgtagcgggccttaatttctactaagtgtagatttttttnnnnnnnnnnaagcttggcgtggatccgatatcaactagatcttgagacaaatggcagtattcatccacaattttaaaagaaaaggggggattggggggtacagtgcaggggaaagaatagtagacataatagcaacagacatacaaactaaag

SEQ ID NO: 20812 - DNA, 301 bp, Artificial Sequence
  NTC.50_NTC.15
  crRNA array
  misc_feature (148)..(157): n is a, c, g, or t
cttggctttatatatcttgtggaaaggacgaaacaccgtaatttctactaagtgtagatattgccgctcgcgcaaaatctaatttctactaagtgtagatgttgtcgtgccgcgaatttataatttctactaagtgtagatttttttnnnnnnnnnnaagcttggcgtggatccgatatcaactagatcttgagacaaatggcagtattcatccacaattttaaaagaaaaggggggattggggggtacagtgcaggggaaagaatagtagacataatagcaacagacatacaaactaaag

SEQ ID NO: 20813 - DNA, 301 bp, Artificial Sequence
  NTC.50_NTC.45
  crRNA array
  misc_feature (148)..(157): n is a, c, g, or t
cttggctttatatatcttgtggaaaggacgaaacaccgtaatttctactaagtgtagatattgccgctcgcgcaaaatctaatttctactaagtgtagatcggaacgcgtgatactagggtaatttctactaagtgtagatttttttnnnnnnnnnnaagcttggcgtggatccgatatcaactagatcttgagacaaatggcagtattcatccacaattttaaaagaaaaggggggattggggggtacagtgcaggggaaagaatagtagacataatagcaacagacatacaaactaaag

SEQ ID NO: 20814 - DNA, 301 bp, Artificial Sequence
  NTC.50_NTC.12
  crRNA array
  misc_feature (148)..(157): n is a, c, g, or t
cttggctttatatatcttgtggaaaggacgaaacaccgtaatttctactaagtgtagatattgccgctcgcgcaaaatctaatttctactaagtgtagatcgccgacgattaatcaatagtaatttctactaagtgtagatttttttnnnnnnnnnnaagcttggcgtggatccgatatcaactagatcttgagacaaatggcagtattcatccacaattttaaaagaaaaggggggattggggggtacagtgcaggggaaagaatagtagacataatagcaacagacatacaaactaaag

SEQ ID NO: 20815 - DNA, 301 bp, Artificial Sequence
  NTC.50_NTC.19
  crRNA array
  misc_feature (148)..(157): n is a, c, g, or t
cttggctttatatatcttgtggaaaggacgaaacaccgtaatttctactaagtgtagatattgccgctcgcgcaaaatctaatttctactaagtgtagatcgtcgtagaacgatacccgataatttctactaagtgtagatttttttnnnnnnnnnnaagcttggcgtggatccgatatcaactagatcttgagacaaatggcagtattcatccacaattttaaaagaaaaggggggattggggggtacagtgcaggggaaagaatagtagacataatagcaacagacatacaaactaaag

SEQ ID NO: 20816 - DNA, 301 bp, Artificial Sequence
  NTC.50_NTC.20
  crRNA array
  misc_feature (148)..(157): n is a, c, g, or t
cttggctttatatatcttgtggaaaggacgaaacaccgtaatttctactaagtgtagatattgccgctcgcgcaaaatctaatttctactaagtgtagatattccggcgcgaccagaagataatttctactaagtgtagatttttttnnnnnnnnnnaagcttggcgtggatccgatatcaactagatcttgagacaaatggcagtattcatccacaattttaaaagaaaaggggggattggggggtacagtgcaggggaaagaatagtagacataatagcaacagacatacaaactaaag

SEQ ID NO: 20817 - DNA, 301 bp, Artificial Sequence
  NTC.50_NTC.48
  crRNA array
  misc_feature (148)..(157): n is a, c, g, or t
cttggctttatatatcttgtggaaaggacgaaacaccgtaatttctactaagtgtagatattgccgctcgcgcaaaatctaatttctactaagtgtagatcggtcgactacggctgttagtaatttctactaagtgtagatttttttnnnnnnnnnnaagcttggcgtggatccgatatcaactagatcttgagacaaatggcagtattcatccacaattttaaaagaaaaggggggattggggggtacagtgcaggggaaagaatagtagacataatagcaacagacatacaaactaaag

SEQ ID NO: 20818 - DNA, 301 bp, Artificial Sequence
  NTC.50_NTC.26
  crRNA array
  misc_feature (148)..(157): n is a, c, g, or t
cttggctttatatatcttgtggaaaggacgaaacaccgtaatttctactaagtgtagatattgccgctcgcgcaaaatctaatttctactaagtgtagatcgcgacggcggttttaacactaatttctactaagtgtagatttttttnnnnnnnnnnaagcttggcgtggatccgatatcaactagatcttgagacaaatggcagtattcatccacaattttaaaagaaaaggggggattggggggtacagtgcaggggaaagaatagtagacataatagcaacagacatacaaactaaag

SEQ ID NO: 20819 - DNA, 301 bp, Artificial Sequence
  NTC.50_NTC.27
  crRNA array
  misc_feature (148)..(157): n is a, c, g, or t
cttggctttatatatcttgtggaaaggacgaaacaccgtaatttctactaagtgtagatattgccgctcgcgcaaaatctaatttctactaagtgtagatgtcgcgttgcgaccggcgcttaatttctactaagtgtagatttttttnnnnnnnnnnaagcttggcgtggatccgatatcaactagatcttgagacaaatggcagtattcatccacaattttaaaagaaaaggggggattggggggtacagtgcaggggaaagaatagtagacataatagcaacagacatacaaactaaag

SEQ ID NO: 20820 - DNA, 301 bp, Artificial Sequence
  NTC.50_NTC.34
  crRNA array
  misc_feature (148)..(157): n is a, c, g, or t
cttggctttatatatcttgtggaaaggacgaaacaccgtaatttctactaagtgtagatattgccgctcgcgcaaaatctaatttctactaagtgtagattagcgttcgacacgtgaaactaatttctactaagtgtagatttttttnnnnnnnnnnaagcttggcgtggatccgatatcaactagatcttgagacaaatggcagtattcatccacaattttaaaagaaaaggggggattggggggtacagtgcaggggaaagaatagtagacataatagcaacagacatacaaactaaag

SEQ ID NO: 20821 - DNA, 301 bp, Artificial Sequence
  NTC.50_NTC.16
  crRNA array
  misc_feature (148)..(157): n is a, c, g, or t
cttggctttatatatcttgtggaaaggacgaaacaccgtaatttctactaagtgtagatattgccgctcgcgcaaaatctaatttctactaagtgtagatcggtacgttagacgaaaatttaatttctactaagtgtagatttttttnnnnnnnnnnaagcttggcgtggatccgatatcaactagatcttgagacaaatggcagtattcatccacaattttaaaagaaaaggggggattggggggtacagtgcaggggaaagaatagtagacataatagcaacagacatacaaactaaag

SEQ ID NO: 20822 - DNA, 301 bp, Artificial Sequence
  NTC.50_NTC.4
  crRNA array
  misc_feature (148)..(157): n is a, c, g, or t
cttggctttatatatcttgtggaaaggacgaaacaccgtaatttctactaagtgtagatattgccgctcgcgcaaaatctaatttctactaagtgtagatatacccgtcgcgaacgtgagtaatttctactaagtgtagatttttttnnnnnnnnnnaagcttggcgtggatccgatatcaactagatcttgagacaaatggcagtattcatccacaattttaaaagaaaaggggggattggggggtacagtgcaggggaaagaatagtagacataatagcaacagacatacaaactaaag

SEQ ID NO: 20823 - DNA, 301 bp, Artificial Sequence
  NTC.50_NTC.42
  crRNA array
  misc_feature (148)..(157): n is a, c, g, or t
cttggctttatatatcttgtggaaaggacgaaacaccgtaatttctactaagtgtagatattgccgctcgcgcaaaatctaatttctactaagtgtagatggtcaaatcgcggcgataactaatttctactaagtgtagatttttttnnnnnnnnnnaagcttggcgtggatccgatatcaactagatcttgagacaaatggcagtattcatccacaattttaaaagaaaaggggggattggggggtacagtgcaggggaaagaatagtagacataatagcaacagacatacaaactaaag

SEQ ID NO: 20824 - DNA, 301 bp, Artificial Sequence
  NTC.50_NTC.22
  crRNA array
  misc_feature (148)..(157): n is a, c, g, or t
cttggctttatatatcttgtggaaaggacgaaacaccgtaatttctactaagtgtagatattgccgctcgcgcaaaatctaatttctactaagtgtagatgcgcgtcaacgtaatgtgcctaatttctactaagtgtagatttttttnnnnnnnnnnaagcttggcgtggatccgatatcaactagatcttgagacaaatggcagtattcatccacaattttaaaagaaaaggggggattggggggtacagtgcaggggaaagaatagtagacataatagcaacagacatacaaactaaag

SEQ ID NO: 20825 - DNA, 301 bp, Artificial Sequence
  NTC.50_NTC.17
  crRNA array
  misc_feature (148)..(157): n is a, c, g, or t
cttggctttatatatcttgtggaaaggacgaaacaccgtaatttctactaagtgtagatattgccgctcgcgcaaaatctaatttctactaagtgtagattatcgaacgctatcgaacgttaatttctactaagtgtagatttttttnnnnnnnnnnaagcttggcgtggatccgatatcaactagatcttgagacaaatggcagtattcatccacaattttaaaagaaaaggggggattggggggtacagtgcaggggaaagaatagtagacataatagcaacagacatacaaactaaag

SEQ ID NO: 20826 - DNA, 301 bp, Artificial Sequence
  NTC.50_NTC.9
  crRNA array
  misc_feature (148)..(157): n is a, c, g, or t
cttggctttatatatcttgtggaaaggacgaaacaccgtaatttctactaagtgtagatattgccgctcgcgcaaaatctaatttctactaagtgtagatatcgccgtacggctatggcataatttctactaagtgtagatttttttnnnnnnnnnnaagcttggcgtggatccgatatcaactagatcttgagacaaatggcagtattcatccacaattttaaaagaaaaggggggattggggggtacagtgcaggggaaagaatagtagacataatagcaacagacatacaaactaaag

SEQ ID NO: 20827 - DNA, 301 bp, Artificial Sequence
  NTC.50_NTC.30
  crRNA array
  misc_feature (148)..(157): n is a, c, g, or t
cttggctttatatatcttgtggaaaggacgaaacaccgtaatttctactaagtgtagatattgccgctcgcgcaaaatctaatttctactaagtgtagatcgatcgtacgggtgtcctaataatttctactaagtgtagatttttttnnnnnnnnnnaagcttggcgtggatccgatatcaactagatcttgagacaaatggcagtattcatccacaattttaaaagaaaaggggggattggggggtacagtgcaggggaaagaatagtagacataatagcaacagacatacaaactaaag

SEQ ID NO: 20828 - DNA, 301 bp, Artificial Sequence
  NTC.50_NTC.8
  crRNA array
  misc_feature (148)..(157): n is a, c, g, or t
cttggctttatatatcttgtggaaaggacgaaacaccgtaatttctactaagtgtagatattgccgctcgcgcaaaatctaatttctactaagtgtagatcgaccgaggttacgctgggataatttctactaagtgtagatttttttnnnnnnnnnnaagcttggcgtggatccgatatcaactagatcttgagacaaatggcagtattcatccacaattttaaaagaaaaggggggattggggggtacagtgcaggggaaagaatagtagacataatagcaacagacatacaaactaaag

SEQ ID NO: 20829 - DNA, 301 bp, Artificial Sequence
  NTC.50_NTC.46
  crRNA array
  misc_feature (148)..(157): n is a, c, g, or t
cttggctttatatatcttgtggaaaggacgaaacaccgtaatttctactaagtgtagatattgccgctcgcgcaaaatctaatttctactaagtgtagatagcgggtcgtagacgcgcggtaatttctactaagtgtagatttttttnnnnnnnnnnaagcttggcgtggatccgatatcaactagatcttgagacaaatggcagtattcatccacaattttaaaagaaaaggggggattggggggtacagtgcaggggaaagaatagtagacataatagcaacagacatacaaactaaag

SEQ ID NO: 20830 - DNA, 301 bp, Artificial Sequence
  NTC.50_NTC.35
  crRNA array
  misc_feature (148)..(157): n is a, c, g, or t
cttggctttatatatcttgtggaaaggacgaaacaccgtaatttctactaagtgtagatattgccgctcgcgcaaaatctaatttctactaagtgtagattggcgcgtaatcgctattcgtaatttctactaagtgtagatttttttnnnnnnnnnnaagcttggcgtggatccgatatcaactagatcttgagacaaatggcagtattcatccacaattttaaaagaaaaggggggattggggggtacagtgcaggggaaagaatagtagacataatagcaacagacatacaaactaaag

SEQ ID NO: 20831 - DNA, 301 bp, Artificial Sequence
  NTC.50_NTC.10
  crRNA array
  misc_feature (148)..(157): n is a, c, g, or t
cttggctttatatatcttgtggaaaggacgaaacaccgtaatttctactaagtgtagatattgccgctcgcgcaaaatctaatttctactaagtgtagatcgctaagttcgcgcgggccgtaatttctactaagtgtagatttttttnnnnnnnnnnaagcttggcgtggatccgatatcaactagatcttgagacaaatggcagtattcatccacaattttaaaagaaaaggggggattggggggtacagtgcaggggaaagaatagtagacataatagcaacagacatacaaactaaag

SEQ ID NO: 20832 - DNA, 301 bp, Artificial Sequence
  NTC.50_NTC.11
  crRNA array
  misc_feature (148)..(157): n is a, c, g, or t
cttggctttatatatcttgtggaaaggacgaaacaccgtaatttctactaagtgtagatattgccgctcgcgcaaaatctaatttctactaagtgtagatcgttcgtcgacgaagcaatctaatttctactaagtgtagatttttttnnnnnnnnnnaagcttggcgtggatccgatatcaactagatcttgagacaaatggcagtattcatccacaattttaaaagaaaaggggggattggggggtacagtgcaggggaaagaatagtagacataatagcaacagacatacaaactaaag

SEQ ID NO: 20833 - DNA, 301 bp, Artificial Sequence
  NTC.50_NTC.14
  crRNA array
  misc_feature (148)..(157): n is a, c, g, or t
cttggctttatatatcttgtggaaaggacgaaacaccgtaatttctactaagtgtagatattgccgctcgcgcaaaatctaatttctactaagtgtagatccgttcgtgcgatagtgttttaatttctactaagtgtagatttttttnnnnnnnnnnaagcttggcgtggatccgatatcaactagatcttgagacaaatggcagtattcatccacaattttaaaagaaaaggggggattggggggtacagtgcaggggaaagaatagtagacataatagcaacagacatacaaactaaag

SEQ ID NO: 20834 - DNA, 301 bp, Artificial Sequence
  NTC.50_NTC.28
  crRNA array
  misc_feature (148)..(157): n is a, c, g, or t
cttggctttatatatcttgtggaaaggacgaaacaccgtaatttctactaagtgtagatattgccgctcgcgcaaaatctaatttctactaagtgtagataccgctaatcggcgtaaacttaatttctactaagtgtagatttttttnnnnnnnnnnaagcttggcgtggatccgatatcaactagatcttgagacaaatggcagtattcatccacaattttaaaagaaaaggggggattggggggtacagtgcaggggaaagaatagtagacataatagcaacagacatacaaactaaag

SEQ ID NO: 20835 - DNA, 301 bp, Artificial Sequence
  NTC.39_NTC.29
  crRNA array
  misc_feature (148)..(157): n is a, c, g, or t
cttggctttatatatcttgtggaaaggacgaaacaccgtaatttctactaagtgtagatccggacgttataacgtttcttaatttctactaagtgtagatcgcgatctataccgtctatataatttctactaagtgtagatttttttnnnnnnnnnnaagcttggcgtggatccgatatcaactagatcttgagacaaatggcagtattcatccacaattttaaaagaaaaggggggattggggggtacagtgcaggggaaagaatagtagacataatagcaacagacatacaaactaaag

SEQ ID NO: 20836 - DNA, 301 bp, Artificial Sequence
  NTC.39_NTC.25
  crRNA array
  misc_feature (148)..(157): n is a, c, g, or t
cttggctttatatatcttgtggaaaggacgaaacaccgtaatttctactaagtgtagatccggacgttataacgtttcttaatttctactaagtgtagattcgcgttatcgtgccgtgcgtaatttctactaagtgtagatttttttnnnnnnnnnnaagcttggcgtggatccgatatcaactagatcttgagacaaatggcagtattcatccacaattttaaaagaaaaggggggattggggggtacagtgcaggggaaagaatagtagacataatagcaacagacatacaaactaaag

SEQ ID NO: 20837 - DNA, 301 bp, Artificial Sequence
  NTC.39_NTC.3
  crRNA array
  misc_feature (148)..(157): n is a, c, g, or t
cttggctttatatatcttgtggaaaggacgaaacaccgtaatttctactaagtgtagatccggacgttataacgtttcttaatttctactaagtgtagattcgacgcgagacgacgtacataatttctactaagtgtagatttttttnnnnnnnnnnaagcttggcgtggatccgatatcaactagatcttgagacaaatggcagtattcatccacaattttaaaagaaaaggggggattggggggtacagtgcaggggaaagaatagtagacataatagcaacagacatacaaactaaag

SEQ ID NO: 20838 - DNA, 301 bp, Artificial Sequence
  NTC.39_NTC.47
  crRNA array
  misc_feature (148)..(157): n is a, c, g, or t
cttggctttatatatcttgtggaaaggacgaaacaccgtaatttctactaagtgtagatccggacgttataacgtttcttaatttctactaagtgtagattctcgtatcgcgattgttaataatttctactaagtgtagatttttttnnnnnnnnnnaagcttggcgtggatccgatatcaactagatcttgagacaaatggcagtattcatccacaattttaaaagaaaaggggggattggggggtacagtgcaggggaaagaatagtagacataatagcaacagacatacaaactaaag

SEQ ID NO: 20839 - DNA, 301 bp, Artificial Sequence
  NTC.39_NTC.32
  crRNA array
  misc_feature (148)..(157): n is a, c, g, or t
cttggctttatatatcttgtggaaaggacgaaacaccgtaatttctactaagtgtagatccggacgttataacgtttcttaatttctactaagtgtagatgcacgttacgcccgggtcactaatttctactaagtgtagatttttttnnnnnnnnnnaagcttggcgtggatccgatatcaactagatcttgagacaaatggcagtattcatccacaattttaaaagaaaaggggggattggggggtacagtgcaggggaaagaatagtagacataatagcaacagacatacaaactaaag

SEQ ID NO: 20840 - DNA, 301 bp, Artificial Sequence
  NTC.39_NTC.40
  crRNA array
  misc_feature (148)..(157): n is a, c, g, or t
cttggctttatatatcttgtggaaaggacgaaacaccgtaatttctactaagtgtagatccggacgttataacgtttcttaatttctactaagtgtagatattcgcgaacccggccggaataatttctactaagtgtagatttttttnnnnnnnnnnaagcttggcgtggatccgatatcaactagatcttgagacaaatggcagtattcatccacaattttaaaagaaaaggggggattggggggtacagtgcaggggaaagaatagtagacataatagcaacagacatacaaactaaag

SEQ ID NO: 20841 - DNA, 301 bp, Artificial Sequence
  NTC.39_NTC.5
  crRNA array
  misc_feature (148)..(157): n is a, c, g, or t
cttggctttatatatcttgtggaaaggacgaaacaccgtaatttctactaagtgtagatccggacgttataacgtttcttaatttctactaagtgtagatgcttacgcgtcgcgaatgtataatttctactaagtgtagatttttttnnnnnnnnnnaagcttggcgtggatccgatatcaactagatcttgagacaaatggcagtattcatccacaattttaaaagaaaaggggggattggggggtacagtgcaggggaaagaatagtagacataatagcaacagacatacaaactaaag

SEQ ID NO: 20842 - DNA, 301 bp, Artificial Sequence
  NTC.39_NTC.33
  crRNA array
  misc_feature (148)..(157): n is a, c, g, or t
cttggctttatatatcttgtggaaaggacgaaacaccgtaatttctactaagtgtagatccggacgttataacgtttcttaatttctactaagtgtagattaagcgaccgacgcattcgctaatttctactaagtgtagatttttttnnnnnnnnnnaagcttggcgtggatccgatatcaactagatcttgagacaaatggcagtattcatccacaattttaaaagaaaaggggggattggggggtacagtgcaggggaaagaatagtagacataatagcaacagacatacaaactaaag

SEQ ID NO: 20843 - DNA, 301 bp, Artificial Sequence
  NTC.39_NTC.1
  crRNA array
  misc_feature (148)..(157): n is a, c, g, or t
cttggctttatatatcttgtggaaaggacgaaacaccgtaatttctactaagtgtagatccggacgttataacgtttcttaatttctactaagtgtagatcgcgtaaccgttccggctcctaatttctactaagtgtagatttttttnnnnnnnnnnaagcttggcgtggatccgatatcaactagatcttgagacaaatggcagtattcatccacaattttaaaagaaaaggggggattggggggtacagtgcaggggaaagaatagtagacataatagcaacagacatacaaactaaag

SEQ ID NO: 20844 - DNA, 301 bp, Artificial Sequence
  NTC.39_NTC.6
  crRNA array
  misc_feature (148)..(157): n is a, c, g, or t
cttggctttatatatcttgtggaaaggacgaaacaccgtaatttctactaagtgtagatccggacgttataacgtttcttaatttctactaagtgtagatcgaatcgcgcctacgggaattaatttctactaagtgtagatttttttnnnnnnnnnnaagcttggcgtggatccgatatcaactagatcttgagacaaatggcagtattcatccacaattttaaaagaaaaggggggattggggggtacagtgcaggggaaagaatagtagacataatagcaacagacatacaaactaaag

SEQ ID NO: 20845 - DNA, 301 bp, Artificial Sequence
  NTC.39_NTC.38
  crRNA array
  misc_feature (148)..(157): n is a, c, g, or t
cttggctttatatatcttgtggaaaggacgaaacaccgtaatttctactaagtgtagatccggacgttataacgtttcttaatttctactaagtgtagataacggagcgcgatactaccataatttctactaagtgtagatttttttnnnnnnnnnnaagcttggcgtggatccgatatcaactagatcttgagacaaatggcagtattcatccacaattttaaaagaaaaggggggattggggggtacagtgcaggggaaagaatagtagacataatagcaacagacatacaaactaaag

SEQ ID NO: 20846 - DNA, 301 bp, Artificial Sequence
  NTC.39_NTC.41
  crRNA array
  misc_feature (148)..(157): n is a, c, g, or t
cttggctttatatatcttgtggaaaggacgaaacaccgtaatttctactaagtgtagatccggacgttataacgtttcttaatttctactaagtgtagatttgatggcgcgacgcgttattaatttctactaagtgtagatttttttnnnnnnnnnnaagcttggcgtggatccgatatcaactagatcttgagacaaatggcagtattcatccacaattttaaaagaaaaggggggattggggggtacagtgcaggggaaagaatagtagacataatagcaacagacatacaaactaaag

SEQ ID NO: 20847 - DNA, 301 bp, Artificial Sequence
  NTC.39_NTC.18
  crRNA array
  misc_feature (148)..(157): n is a, c, g, or t
cttggctttatatatcttgtggaaaggacgaaacaccgtaatttctactaagtgtagatccggacgttataacgtttcttaatttctactaagtgtagattccggttacgaccggcaaaataatttctactaagtgtagatttttttnnnnnnnnnnaagcttggcgtggatccgatatcaactagatcttgagacaaatggcagtattcatccacaattttaaaagaaaaggggggattggggggtacagtgcaggggaaagaatagtagacataatagcaacagacatacaaactaaag

SEQ ID NO: 20848 - DNA, 301 bp, Artificial Sequence
  NTC.39_NTC.24
  crRNA array
  misc_feature (148)..(157): n is a, c, g, or t
cttggctttatatatcttgtggaaaggacgaaacaccgtaatttctactaagtgtagatccggacgttataacgtttcttaatttctactaagtgtagatactatcgacgttcgtcccggtaatttctactaagtgtagatttttttnnnnnnnnnnaagcttggcgtggatccgatatcaactagatcttgagacaaatggcagtattcatccacaattttaaaagaaaaggggggattggggggtacagtgcaggggaaagaatagtagacataatagcaacagacatacaaactaaag

SEQ ID NO: 20849 - DNA, 301 bp, Artificial Sequence
  NTC.39_NTC.31
  crRNA array
  misc_feature (148)..(157): n is a, c, g, or t
cttggctttatatatcttgtggaaaggacgaaacaccgtaatttctactaagtgtagatccggacgttataacgtttcttaatttctactaagtgtagatgccgaccgcgtgattgtaggtaatttctactaagtgtagatttttttnnnnnnnnnnaagcttggcgtggatccgatatcaactagatcttgagacaaatggcagtattcatccacaattttaaaagaaaaggggggattggggggtacagtgcaggggaaagaatagtagacataatagcaacagacatacaaactaaag

SEQ ID NO: 20850 - DNA, 301 bp, Artificial Sequence
  NTC.39_NTC.51
  crRNA array
  misc_feature (148)..(157): n is a, c, g, or t
cttggctttatatatcttgtggaaaggacgaaacaccgtaatttctactaagtgtagatccggacgttataacgtttcttaatttctactaagtgtagattaacgcgcaacacgccaatgtaatttctactaagtgtagatttttttnnnnnnnnnnaagcttggcgtggatccgatatcaactagatcttgagacaaatggcagtattcatccacaattttaaaagaaaaggggggattggggggtacagtgcaggggaaagaatagtagacataatagcaacagacatacaaactaaag

SEQ ID NO: 20851 - DNA, 301 bp, Artificial Sequence
  NTC.39_NTC.23
  crRNA array
  misc_feature (148)..(157): n is a, c, g, or t
cttggctttatatatcttgtggaaaggacgaaacaccgtaatttctactaagtgtagatccggacgttataacgtttcttaatttctactaagtgtagatacgcgctattatcgtaggtgtaatttctactaagtgtagatttttttnnnnnnnnnnaagcttggcgtggatccgatatcaactagatcttgagacaaatggcagtattcatccacaattttaaaagaaaaggggggattggggggtacagtgcaggggaaagaatagtagacataatagcaacagacatacaaactaaag

SEQ ID NO: 20852 - DNA, 301 bp, Artificial Sequence
  NTC.39_NTC.36
  crRNA array
  misc_feature (148)..(157): n is a, c, g, or t
cttggctttatatatcttgtggaaaggacgaaacaccgtaatttctactaagtgtagatccggacgttataacgtttcttaatttctactaagtgtagatcaacccgccgtagcgggccttaatttctactaagtgtagatttttttnnnnnnnnnnaagcttggcgtggatccgatatcaactagatcttgagacaaatggcagtattcatccacaattttaaaagaaaaggggggattggggggtacagtgcaggggaaagaatagtagacataatagcaacagacatacaaactaaag

SEQ ID NO: 20853 - DNA, 301 bp, Artificial Sequence
  NTC.39_NTC.15
  crRNA array
  misc_feature (148)..(157): n is a, c, g, or t
cttggctttatatatcttgtggaaaggacgaaacaccgtaatttctactaagtgtagatccggacgttataacgtttcttaatttctactaagtgtagatgttgtcgtgccgcgaatttataatttctactaagtgtagatttttttnnnnnnnnnnaagcttggcgtggatccgatatcaactagatcttgagacaaatggcagtattcatccacaattttaaaagaaaaggggggattggggggtacagtgcaggggaaagaatagtagacataatagcaacagacatacaaactaaag

SEQ ID NO: 20854 - DNA, 301 bp, Artificial Sequence
  NTC.39_NTC.45
  crRNA array
  misc_feature (148)..(157): n is a, c, g, or t
cttggctttatatatcttgtggaaaggacgaaacaccgtaatttctactaagtgtagatccggacgttataacgtttcttaatttctactaagtgtagatcggaacgcgtgatactagggtaatttctactaagtgtagatttttttnnnnnnnnnnaagcttggcgtggatccgatatcaactagatcttgagacaaatggcagtattcatccacaattttaaaagaaaaggggggattggggggtacagtgcaggggaaagaatagtagacataatagcaacagacatacaaactaaag

SEQ ID NO: 20855 - DNA, 301 bp, Artificial Sequence
  NTC.39_NTC.12
  crRNA array
  misc_feature (148)..(157): n is a, c, g, or t
cttggctttatatatcttgtggaaaggacgaaacaccgtaatttctactaagtgtagatccggacgttataacgtttcttaatttctactaagtgtagatcgccgacgattaatcaatagtaatttctactaagtgtagatttttttnnnnnnnnnnaagcttggcgtggatccgatatcaactagatcttgagacaaatggcagtattcatccacaattttaaaagaaaaggggggattggggggtacagtgcaggggaaagaatagtagacataatagcaacagacatacaaactaaag

SEQ ID NO: 20856 - DNA, 301 bp, Artificial Sequence
  NTC.39_NTC.19
  crRNA array
  misc_feature (148)..(157): n is a, c, g, or t
cttggctttatatatcttgtggaaaggacgaaacaccgtaatttctactaagtgtagatccggacgttataacgtttcttaatttctactaagtgtagatcgtcgtagaacgatacccgataatttctactaagtgtagatttttttnnnnnnnnnnaagcttggcgtggatccgatatcaactagatcttgagacaaatggcagtattcatccacaattttaaaagaaaaggggggattggggggtacagtgcaggggaaagaatagtagacataatagcaacagacatacaaactaaag

SEQ ID NO: 20857 - DNA, 301 bp, Artificial Sequence
  NTC.39_NTC.20
  crRNA array
  misc_feature (148)..(157): n is a, c, g, or t
cttggctttatatatcttgtggaaaggacgaaacaccgtaatttctactaagtgtagatccggacgttataacgtttcttaatttctactaagtgtagatattccggcgcgaccagaagataatttctactaagtgtagatttttttnnnnnnnnnnaagcttggcgtggatccgatatcaactagatcttgagacaaatggcagtattcatccacaattttaaaagaaaaggggggattggggggtacagtgcaggggaaagaatagtagacataatagcaacagacatacaaactaaag

SEQ ID NO: 20858 - DNA, 301 bp, Artificial Sequence
  NTC.39_NTC.48
  crRNA array
  misc_feature (148)..(157): n is a, c, g, or t
cttggctttatatatcttgtggaaaggacgaaacaccgtaatttctactaagtgtagatccggacgttataacgtttcttaatttctactaagtgtagatcggtcgactacggctgttagtaatttctactaagtgtagatttttttnnnnnnnnnnaagcttggcgtggatccgatatcaactagatcttgagacaaatggcagtattcatccacaattttaaaagaaaaggggggattggggggtacagtgcaggggaaagaatagtagacataatagcaacagacatacaaactaaag

SEQ ID NO: 20859 - DNA, 301 bp, Artificial Sequence
  NTC.39_NTC.26
  crRNA array
  misc_feature (148)..(157): n is a, c, g, or t
cttggctttatatatcttgtggaaaggacgaaacaccgtaatttctactaagtgtagatccggacgttataacgtttcttaatttctactaagtgtagatcgcgacggcggttttaacactaatttctactaagtgtagatttttttnnnnnnnnnnaagcttggcgtggatccgatatcaactagatcttgagacaaatggcagtattcatccacaattttaaaagaaaaggggggattggggggtacagtgcaggggaaagaatagtagacataatagcaacagacatacaaactaaag

SEQ ID NO: 20860 - DNA, 301 bp, Artificial Sequence
  NTC.39_NTC.27
  crRNA array
  misc_feature (148)..(157): n is a, c, g, or t
cttggctttatatatcttgtggaaaggacgaaacaccgtaatttctactaagtgtagatccggacgttataacgtttcttaatttctactaagtgtagatgtcgcgttgcgaccggcgcttaatttctactaagtgtagatttttttnnnnnnnnnnaagcttggcgtggatccgatatcaactagatcttgagacaaatggcagtattcatccacaattttaaaagaaaaggggggattggggggtacagtgcaggggaaagaatagtagacataatagcaacagacatacaaactaaag

SEQ ID NO: 20861 - DNA, 301 bp, Artificial Sequence
  NTC.39_NTC.34
  crRNA array
  misc_feature (148)..(157): n is a, c, g, or t
cttggctttatatatcttgtggaaaggacgaaacaccgtaatttctactaagtgtagatccggacgttataacgtttcttaatttctactaagtgtagattagcgttcgacacgtgaaactaatttctactaagtgtagatttttttnnnnnnnnnnaagcttggcgtggatccgatatcaactagatcttgagacaaatggcagtattcatccacaattttaaaagaaaaggggggattggggggtacagtgcaggggaaagaatagtagacataatagcaacagacatacaaactaaag

SEQ ID NO: 20862 - DNA, 301 bp, Artificial Sequence
  NTC.39_NTC.16
  crRNA array
  misc_feature (148)..(157): n is a, c, g, or t
cttggctttatatatcttgtggaaaggacgaaacaccgtaatttctactaagtgtagatccggacgttataacgtttcttaatttctactaagtgtagatcggtacgttagacgaaaatttaatttctactaagtgtagatttttttnnnnnnnnnnaagcttggcgtggatccgatatcaactagatcttgagacaaatggcagtattcatccacaattttaaaagaaaaggggggattggggggtacagtgcaggggaaagaatagtagacataatagcaacagacatacaaactaaag

SEQ ID NO: 20863 - DNA, 301 bp, Artificial Sequence
  NTC.39_NTC.4
  crRNA array
  misc_feature (148)..(157): n is a, c, g, or t
cttggctttatatatcttgtggaaaggacgaaacaccgtaatttctactaagtgtagatccggacgttataacgtttcttaatttctactaagtgtagatatacccgtcgcgaacgtgagtaatttctactaagtgtagatttttttnnnnnnnnnnaagcttggcgtggatccgatatcaactagatcttgagacaaatggcagtattcatccacaattttaaaagaaaaggggggattggggggtacagtgcaggggaaagaatagtagacataatagcaacagacatacaaactaaag

SEQ ID NO: 20864 - DNA, 301 bp, Artificial Sequence
  NTC.39_NTC.42
  crRNA array
  misc_feature (148)..(157): n is a, c, g, or t
cttggctttatatatcttgtggaaaggacgaaacaccgtaatttctactaagtgtagatccggacgttataacgtttcttaatttctactaagtgtagatggtcaaatcgcggcgataactaatttctactaagtgtagatttttttnnnnnnnnnnaagcttggcgtggatccgatatcaactagatcttgagacaaatggcagtattcatccacaattttaaaagaaaaggggggattggggggtacagtgcaggggaaagaatagtagacataatagcaacagacatacaaactaaag

SEQ ID NO: 20865 - DNA, 301 bp, Artificial Sequence
  NTC.39_NTC.22
  crRNA array
  misc_feature (148)..(157): n is a, c, g, or t
cttggctttatatatcttgtggaaaggacgaaacaccgtaatttctactaagtgtagatccggacgttataacgtttcttaatttctactaagtgtagatgcgcgtcaacgtaatgtgcctaatttctactaagtgtagatttttttnnnnnnnnnnaagcttggcgtggatccgatatcaactagatcttgagacaaatggcagtattcatccacaattttaaaagaaaaggggggattggggggtacagtgcaggggaaagaatagtagacataatagcaacagacatacaaactaaag

SEQ ID NO: 20866 - DNA, 301 bp, Artificial Sequence
  NTC.39_NTC.17
  crRNA array
  misc_feature (148)..(157): n is a, c, g, or t
cttggctttatatatcttgtggaaaggacgaaacaccgtaatttctactaagtgtagatccggacgttataacgtttcttaatttctactaagtgtagattatcgaacgctatcgaacgttaatttctactaagtgtagatttttttnnnnnnnnnnaagcttggcgtggatccgatatcaactagatcttgagacaaatggcagtattcatccacaattttaaaagaaaaggggggattggggggtacagtgcaggggaaagaatagtagacataatagcaacagacatacaaactaaag

SEQ ID NO: 20867 - DNA, 301 bp, Artificial Sequence
  NTC.39_NTC.9
  crRNA array
  misc_feature (148)..(157): n is a, c, g, or t
cttggctttatatatcttgtggaaaggacgaaacaccgtaatttctactaagtgtagatccggacgttataacgtttcttaatttctactaagtgtagatatcgccgtacggctatggcataatttctactaagtgtagatttttttnnnnnnnnnnaagcttggcgtggatccgatatcaactagatcttgagacaaatggcagtattcatccacaattttaaaagaaaaggggggattggggggtacagtgcaggggaaagaatagtagacataatagcaacagacatacaaactaaag

SEQ ID NO: 20868 - DNA, 301 bp, Artificial Sequence
  NTC.39_NTC.30
  crRNA array
  misc_feature (148)..(157): n is a, c, g, or t
cttggctttatatatcttgtggaaaggacgaaacaccgtaatttctactaagtgtagatccggacgttataacgtttcttaatttctactaagtgtagatcgatcgtacgggtgtcctaataatttctactaagtgtagatttttttnnnnnnnnnnaagcttggcgtggatccgatatcaactagatcttgagacaaatggcagtattcatccacaattttaaaagaaaaggggggattggggggtacagtgcaggggaaagaatagtagacataatagcaacagacatacaaactaaag

SEQ ID NO: 20869 - DNA, 301 bp, Artificial Sequence
  NTC.39_NTC.8
  crRNA array
  misc_feature (148)..(157): n is a, c, g, or t
cttggctttatatatcttgtggaaaggacgaaacaccgtaatttctactaagtgtagatccggacgttataacgtttcttaatttctactaagtgtagatcgaccgaggttacgctgggataatttctactaagtgtagatttttttnnnnnnnnnnaagcttggcgtggatccgatatcaactagatcttgagacaaatggcagtattcatccacaattttaaaagaaaaggggggattggggggtacagtgcaggggaaagaatagtagacataatagcaacagacatacaaactaaag

SEQ ID NO: 20870 - DNA, 301 bp, Artificial Sequence
  NTC.39_NTC.46
  crRNA array
  misc_feature (148)..(157): n is a, c, g, or t
cttggctttatatatcttgtggaaaggacgaaacaccgtaatttctactaagtgtagatccggacgttataacgtttcttaatttctactaagtgtagatagcgggtcgtagacgcgcggtaatttctactaagtgtagatttttttnnnnnnnnnnaagcttggcgtggatccgatatcaactagatcttgagacaaatggcagtattcatccacaattttaaaagaaaaggggggattggggggtacagtgcaggggaaagaatagtagacataatagcaacagacatacaaactaaag

SEQ ID NO: 20871 - DNA, 301 bp, Artificial Sequence
  NTC.39_NTC.35
  crRNA array
  misc_feature (148)..(157): n is a, c, g, or t
cttggctttatatatcttgtggaaaggacgaaacaccgtaatttctactaagtgtagatccggacgttataacgtttcttaatttctactaagtgtagattggcgcgtaatcgctattcgtaatttctactaagtgtagatttttttnnnnnnnnnnaagcttggcgtggatccgatatcaactagatcttgagacaaatggcagtattcatccacaattttaaaagaaaaggggggattggggggtacagtgcaggggaaagaatagtagacataatagcaacagacatacaaactaaag

SEQ ID NO: 20872 - DNA, 301 bp, Artificial Sequence
  NTC.39_NTC.10
  crRNA array
  misc_feature (148)..(157): n is a, c, g, or t
cttggctttatatatcttgtggaaaggacgaaacaccgtaatttctactaagtgtagatccggacgttataacgtttcttaatttctactaagtgtagatcgctaagttcgcgcgggccgtaatttctactaagtgtagatttttttnnnnnnnnnnaagcttggcgtggatccgatatcaactagatcttgagacaaatggcagtattcatccacaattttaaaagaaaaggggggattggggggtacagtgcaggggaaagaatagtagacataatagcaacagacatacaaactaaag

SEQ ID NO: 20873 - DNA, 301 bp, Artificial Sequence
  NTC.39_NTC.11
  crRNA array
  misc_feature (148)..(157): n is a, c, g, or t
cttggctttatatatcttgtggaaaggacgaaacaccgtaatttctactaagtgtagatccggacgttataacgtttcttaatttctactaagtgtagatcgttcgtcgacgaagcaatctaatttctactaagtgtagatttttttnnnnnnnnnnaagcttggcgtggatccgatatcaactagatcttgagacaaatggcagtattcatccacaattttaaaagaaaaggggggattggggggtacagtgcaggggaaagaatagtagacataatagcaacagacatacaaactaaag

SEQ ID NO: 20874 - DNA, 301 bp, Artificial Sequence
  NTC.39_NTC.14
  crRNA array
  misc_feature (148)..(157): n is a, c, g, or t
cttggctttatatatcttgtggaaaggacgaaacaccgtaatttctactaagtgtagatccggacgttataacgtttcttaatttctactaagtgtagatccgttcgtgcgatagtgttttaatttctactaagtgtagatttttttnnnnnnnnnnaagcttggcgtggatccgatatcaactagatcttgagacaaatggcagtattcatccacaattttaaaagaaaaggggggattggggggtacagtgcaggggaaagaatagtagacataatagcaacagacatacaaactaaag

SEQ ID NO: 20875 - DNA, 301 bp, Artificial Sequence
  NTC.39_NTC.28
  crRNA array
  misc_feature (148)..(157): n is a, c, g, or t
cttggctttatatatcttgtggaaaggacgaaacaccgtaatttctactaagtgtagatccggacgttataacgtttcttaatttctactaagtgtagataccgctaatcggcgtaaacttaatttctactaagtgtagatttttttnnnnnnnnnnaagcttggcgtggatccgatatcaactagatcttgagacaaatggcagtattcatccacaattttaaaagaaaaggggggattggggggtacagtgcaggggaaagaatagtagacataatagcaacagacatacaaactaaag

SEQ ID NO: 20876 - DNA, 301 bp, Artificial Sequence
  NTC.29_NTC.25
  crRNA array
  misc_feature (148)..(157): n is a, c, g, or t
cttggctttatatatcttgtggaaaggacgaaacaccgtaatttctactaagtgtagatcgcgatctataccgtctatataatttctactaagtgtagattcgcgttatcgtgccgtgcgtaatttctactaagtgtagatttttttnnnnnnnnnnaagcttggcgtggatccgatatcaactagatcttgagacaaatggcagtattcatccacaattttaaaagaaaaggggggattggggggtacagtgcaggggaaagaatagtagacataatagcaacagacatacaaactaaag

SEQ ID NO: 20877 - DNA, 301 bp, Artificial Sequence
  NTC.29_NTC.3
  crRNA array
  misc_feature (148)..(157): n is a, c, g, or t
cttggctttatatatcttgtggaaaggacgaaacaccgtaatttctactaagtgtagatcgcgatctataccgtctatataatttctactaagtgtagattcgacgcgagacgacgtacataatttctactaagtgtagatttttttnnnnnnnnnnaagcttggcgtggatccgatatcaactagatcttgagacaaatggcagtattcatccacaattttaaaagaaaaggggggattggggggtacagtgcaggggaaagaatagtagacataatagcaacagacatacaaactaaag

SEQ ID NO: 20878 - DNA, 301 bp, Artificial Sequence
  NTC.29_NTC.47
  crRNA array
  misc_feature (148)..(157): n is a, c, g, or t
cttggctttatatatcttgtggaaaggacgaaacaccgtaatttctactaagtgtagatcgcgatctataccgtctatataatttctactaagtgtagattctcgtatcgcgattgttaataatttctactaagtgtagatttttttnnnnnnnnnnaagcttggcgtggatccgatatcaactagatcttgagacaaatggcagtattcatccacaattttaaaagaaaaggggggattggggggtacagtgcaggggaaagaatagtagacataatagcaacagacatacaaactaaag

SEQ ID NO: 20879 - DNA, 301 bp, Artificial Sequence
  NTC.29_NTC.32
  crRNA array
  misc_feature (148)..(157): n is a, c, g, or t
cttggctttatatatcttgtggaaaggacgaaacaccgtaatttctactaagtgtagatcgcgatctataccgtctatataatttctactaagtgtagatgcacgttacgcccgggtcactaatttctactaagtgtagatttttttnnnnnnnnnnaagcttggcgtggatccgatatcaactagatcttgagacaaatggcagtattcatccacaattttaaaagaaaaggggggattggggggtacagtgcaggggaaagaatagtagacataatagcaacagacatacaaactaaag

SEQ ID NO: 20880 - DNA, 301 bp, Artificial Sequence
  NTC.29_NTC.40
  crRNA array
  misc_feature (148)..(157): n is a, c, g, or t
cttggctttatatatcttgtggaaaggacgaaacaccgtaatttctactaagtgtagatcgcgatctataccgtctatataatttctactaagtgtagatattcgcgaacccggccggaataatttctactaagtgtagatttttttnnnnnnnnnnaagcttggcgtggatccgatatcaactagatcttgagacaaatggcagtattcatccacaattttaaaagaaaaggggggattggggggtacagtgcaggggaaagaatagtagacataatagcaacagacatacaaactaaag

SEQ ID NO: 20881 - DNA, 301 bp, Artificial Sequence
  NTC.29_NTC.5
  crRNA array
  misc_feature (148)..(157): n is a, c, g, or t
cttggctttatatatcttgtggaaaggacgaaacaccgtaatttctactaagtgtagatcgcgatctataccgtctatataatttctactaagtgtagatgcttacgcgtcgcgaatgtataatttctactaagtgtagatttttttnnnnnnnnnnaagcttggcgtggatccgatatcaactagatcttgagacaaatggcagtattcatccacaattttaaaagaaaaggggggattggggggtacagtgcaggggaaagaatagtagacataatagcaacagacatacaaactaaag

SEQ ID NO: 20882 - DNA, 301 bp, Artificial Sequence
  NTC.29_NTC.33
  crRNA array
  misc_feature (148)..(157): n is a, c, g, or t
cttggctttatatatcttgtggaaaggacgaaacaccgtaatttctactaagtgtagatcgcgatctataccgtctatataatttctactaagtgtagattaagcgaccgacgcattcgctaatttctactaagtgtagatttttttnnnnnnnnnnaagcttggcgtggatccgatatcaactagatcttgagacaaatggcagtattcatccacaattttaaaagaaaaggggggattggggggtacagtgcaggggaaagaatagtagacataatagcaacagacatacaaactaaag

SEQ ID NO: 20883 - DNA, 301 bp, Artificial Sequence
  NTC.29_NTC.1
  crRNA array
  misc_feature (148)..(157): n is a, c, g, or t
cttggctttatatatcttgtggaaaggacgaaacaccgtaatttctactaagtgtagatcgcgatctataccgtctatataatttctactaagtgtagatcgcgtaaccgttccggctcctaatttctactaagtgtagatttttttnnnnnnnnnnaagcttggcgtggatccgatatcaactagatcttgagacaaatggcagtattcatccacaattttaaaagaaaaggggggattggggggtacagtgcaggggaaagaatagtagacataatagcaacagacatacaaactaaag

SEQ ID NO: 20884 - DNA, 301 bp, Artificial Sequence
  NTC.29_NTC.6
  crRNA array
  misc_feature (148)..(157): n is a, c, g, or t
cttggctttatatatcttgtggaaaggacgaaacaccgtaatttctactaagtgtagatcgcgatctataccgtctatataatttctactaagtgtagatcgaatcgcgcctacgggaattaatttctactaagtgtagatttttttnnnnnnnnnnaagcttggcgtggatccgatatcaactagatcttgagacaaatggcagtattcatccacaattttaaaagaaaaggggggattggggggtacagtgcaggggaaagaatagtagacataatagcaacagacatacaaactaaag

SEQ ID NO: 20885 - DNA, 301 bp, Artificial Sequence
  NTC.29_NTC.38
  crRNA array
  misc_feature (148)..(157): n is a, c, g, or t
cttggctttatatatcttgtggaaaggacgaaacaccgtaatttctactaagtgtagatcgcgatctataccgtctatataatttctactaagtgtagataacggagcgcgatactaccataatttctactaagtgtagatttttttnnnnnnnnnnaagcttggcgtggatccgatatcaactagatcttgagacaaatggcagtattcatccacaattttaaaagaaaaggggggattggggggtacagtgcaggggaaagaatagtagacataatagcaacagacatacaaactaaag

SEQ ID NO: 20886 - DNA, 301 bp, Artificial Sequence
  NTC.29_NTC.41
  crRNA array
  misc_feature (148)..(157): n is a, c, g, or t
cttggctttatatatcttgtggaaaggacgaaacaccgtaatttctactaagtgtagatcgcgatctataccgtctatataatttctactaagtgtagatttgatggcgcgacgcgttattaatttctactaagtgtagatttttttnnnnnnnnnnaagcttggcgtggatccgatatcaactagatcttgagacaaatggcagtattcatccacaattttaaaagaaaaggggggattggggggtacagtgcaggggaaagaatagtagacataatagcaacagacatacaaactaaag

SEQ ID NO: 20887 - DNA, 301 bp, Artificial Sequence
  NTC.29_NTC.18
  crRNA array
  misc_feature (148)..(157): n is a, c, g, or t
cttggctttatatatcttgtggaaaggacgaaacaccgtaatttctactaagtgtagatcgcgatctataccgtctatataatttctactaagtgtagattccggttacgaccggcaaaataatttctactaagtgtagatttttttnnnnnnnnnnaagcttggcgtggatccgatatcaactagatcttgagacaaatggcagtattcatccacaattttaaaagaaaaggggggattggggggtacagtgcaggggaaagaatagtagacataatagcaacagacatacaaactaaag

SEQ ID NO: 20888 - DNA, 301 bp, Artificial Sequence
  NTC.29_NTC.24
  crRNA array
  misc_feature (148)..(157): n is a, c, g, or t
cttggctttatatatcttgtggaaaggacgaaacaccgtaatttctactaagtgtagatcgcgatctataccgtctatataatttctactaagtgtagatactatcgacgttcgtcccggtaatttctactaagtgtagatttttttnnnnnnnnnnaagcttggcgtggatccgatatcaactagatcttgagacaaatggcagtattcatccacaattttaaaagaaaaggggggattggggggtacagtgcaggggaaagaatagtagacataatagcaacagacatacaaactaaag

SEQ ID NO: 20889 - DNA, 301 bp, Artificial Sequence
  NTC.29_NTC.31
  crRNA array
  misc_feature (148)..(157): n is a, c, g, or t
cttggctttatatatcttgtggaaaggacgaaacaccgtaatttctactaagtgtagatcgcgatctataccgtctatataatttctactaagtgtagatgccgaccgcgtgattgtaggtaatttctactaagtgtagatttttttnnnnnnnnnnaagcttggcgtggatccgatatcaactagatcttgagacaaatggcagtattcatccacaattttaaaagaaaaggggggattggggggtacagtgcaggggaaagaatagtagacataatagcaacagacatacaaactaaag

SEQ ID NO: 20890 - DNA, 301 bp, Artificial Sequence
  NTC.29_NTC.51
  crRNA array
  misc_feature (148)..(157): n is a, c, g, or t
cttggctttatatatcttgtggaaaggacgaaacaccgtaatttctactaagtgtagatcgcgatctataccgtctatataatttctactaagtgtagattaacgcgcaacacgccaatgtaatttctactaagtgtagatttttttnnnnnnnnnnaagcttggcgtggatccgatatcaactagatcttgagacaaatggcagtattcatccacaattttaaaagaaaaggggggattggggggtacagtgcaggggaaagaatagtagacataatagcaacagacatacaaactaaag

SEQ ID NO: 20891 - DNA, 301 bp, Artificial Sequence
  NTC.29_NTC.23
  crRNA array
  misc_feature (148)..(157): n is a, c, g, or t
cttggctttatatatcttgtggaaaggacgaaacaccgtaatttctactaagtgtagatcgcgatctataccgtctatataatttctactaagtgtagatacgcgctattatcgtaggtgtaatttctactaagtgtagatttttttnnnnnnnnnnaagcttggcgtggatccgatatcaactagatcttgagacaaatggcagtattcatccacaattttaaaagaaaaggggggattggggggtacagtgcaggggaaagaatagtagacataatagcaacagacatacaaactaaag

SEQ ID NO: 20892 - DNA, 301 bp, Artificial Sequence
  NTC.29_NTC.36
  crRNA array
  misc_feature (148)..(157): n is a, c, g, or t
cttggctttatatatcttgtggaaaggacgaaacaccgtaatttctactaagtgtagatcgcgatctataccgtctatataatttctactaagtgtagatcaacccgccgtagcgggccttaatttctactaagtgtagatttttttnnnnnnnnnnaagcttggcgtggatccgatatcaactagatcttgagacaaatggcagtattcatccacaattttaaaagaaaaggggggattggggggtacagtgcaggggaaagaatagtagacataatagcaacagacatacaaactaaag

SEQ ID NO: 20893 - DNA, 301 bp, Artificial Sequence
  NTC.29_NTC.15
  crRNA array
  misc_feature (148)..(157): n is a, c, g, or t
cttggctttatatatcttgtggaaaggacgaaacaccgtaatttctactaagtgtagatcgcgatctataccgtctatataatttctactaagtgtagatgttgtcgtgccgcgaatttataatttctactaagtgtagatttttttnnnnnnnnnnaagcttggcgtggatccgatatcaactagatcttgagacaaatggcagtattcatccacaattttaaaagaaaaggggggattggggggtacagtgcaggggaaagaatagtagacataatagcaacagacatacaaactaaag

SEQ ID NO: 20894 - DNA, 301 bp, Artificial Sequence
  NTC.29_NTC.45
  crRNA array
  misc_feature (148)..(157): n is a, c, g, or t
cttggctttatatatcttgtggaaaggacgaaacaccgtaatttctactaagtgtagatcgcgatctataccgtctatataatttctactaagtgtagatcggaacgcgtgatactagggtaatttctactaagtgtagatttttttnnnnnnnnnnaagcttggcgtggatccgatatcaactagatcttgagacaaatggcagtattcatccacaattttaaaagaaaaggggggattggggggtacagtgcaggggaaagaatagtagacataatagcaacagacatacaaactaaag

SEQ ID NO: 20895 - DNA, 301 bp, Artificial Sequence
  NTC.29_NTC.12
  crRNA array
  misc_feature (148)..(157): n is a, c, g, or t
cttggctttatatatcttgtggaaaggacgaaacaccgtaatttctactaagtgtagatcgcgatctataccgtctatataatttctactaagtgtagatcgccgacgattaatcaatagtaatttctactaagtgtagatttttttnnnnnnnnnnaagcttggcgtggatccgatatcaactagatcttgagacaaatggcagtattcatccacaattttaaaagaaaaggggggattggggggtacagtgcaggggaaagaatagtagacataatagcaacagacatacaaactaaag

SEQ ID NO: 20896 - DNA, 301 bp, Artificial Sequence
  NTC.29_NTC.19
  crRNA array
  misc_feature (148)..(157): n is a, c, g, or t
cttggctttatatatcttgtggaaaggacgaaacaccgtaatttctactaagtgtagatcgcgatctataccgtctatataatttctactaagtgtagatcgtcgtagaacgatacccgataatttctactaagtgtagatttttttnnnnnnnnnnaagcttggcgtggatccgatatcaactagatcttgagacaaatggcagtattcatccacaattttaaaagaaaaggggggattggggggtacagtgcaggggaaagaatagtagacataatagcaacagacatacaaactaaag

SEQ ID NO: 20897 - DNA, 301 bp, Artificial Sequence
  NTC.29_NTC.20
  crRNA array
  misc_feature (148)..(157): n is a, c, g, or t
cttggctttatatatcttgtggaaaggacgaaacaccgtaatttctactaagtgtagatcgcgatctataccgtctatataatttctactaagtgtagatattccggcgcgaccagaagataatttctactaagtgtagatttttttnnnnnnnnnnaagcttggcgtggatccgatatcaactagatcttgagacaaatggcagtattcatccacaattttaaaagaaaaggggggattggggggtacagtgcaggggaaagaatagtagacataatagcaacagacatacaaactaaag

SEQ ID NO: 20898 - DNA, 301 bp, Artificial Sequence
  NTC.29_NTC.48
  crRNA array
  misc_feature (148)..(157): n is a, c, g, or t
cttggctttatatatcttgtggaaaggacgaaacaccgtaatttctactaagtgtagatcgcgatctataccgtctatataatttctactaagtgtagatcggtcgactacggctgttagtaatttctactaagtgtagatttttttnnnnnnnnnnaagcttggcgtggatccgatatcaactagatcttgagacaaatggcagtattcatccacaattttaaaagaaaaggggggattggggggtacagtgcaggggaaagaatagtagacataatagcaacagacatacaaactaaag

SEQ ID NO: 20899 - DNA, 301 bp, Artificial Sequence
  NTC.29_NTC.26
  crRNA array
  misc_feature (148)..(157): n is a, c, g, or t
cttggctttatatatcttgtggaaaggacgaaacaccgtaatttctactaagtgtagatcgcgatctataccgtctatataatttctactaagtgtagatcgcgacggcggttttaacactaatttctactaagtgtagatttttttnnnnnnnnnnaagcttggcgtggatccgatatcaactagatcttgagacaaatggcagtattcatccacaattttaaaagaaaaggggggattggggggtacagtgcaggggaaagaatagtagacataatagcaacagacatacaaactaaag

SEQ ID NO: 20900 - DNA, 301 bp, Artificial Sequence
  NTC.29_NTC.27
  crRNA array
  misc_feature (148)..(157): n is a, c, g, or t
cttggctttatatatcttgtggaaaggacgaaacaccgtaatttctactaagtgtagatcgcgatctataccgtctatataatttctactaagtgtagatgtcgcgttgcgaccggcgcttaatttctactaagtgtagatttttttnnnnnnnnnnaagcttggcgtggatccgatatcaactagatcttgagacaaatggcagtattcatccacaattttaaaagaaaaggggggattggggggtacagtgcaggggaaagaatagtagacataatagcaacagacatacaaactaaag

SEQ ID NO: 20901 - DNA, 301 bp, Artificial Sequence
  NTC.29_NTC.34
  crRNA array
  misc_feature (148)..(157): n is a, c, g, or t
cttggctttatatatcttgtggaaaggacgaaacaccgtaatttctactaagtgtagatcgcgatctataccgtctatataatttctactaagtgtagattagcgttcgacacgtgaaactaatttctactaagtgtagatttttttnnnnnnnnnnaagcttggcgtggatccgatatcaactagatcttgagacaaatggcagtattcatccacaattttaaaagaaaaggggggattggggggtacagtgcaggggaaagaatagtagacataatagcaacagacatacaaactaaag

SEQ ID NO: 20902 - DNA, 301 bp, Artificial Sequence
  NTC.29_NTC.16
  crRNA array
  misc_feature (148)..(157): n is a, c, g, or t
cttggctttatatatcttgtggaaaggacgaaacaccgtaatttctactaagtgtagatcgcgatctataccgtctatataatttctactaagtgtagatcggtacgttagacgaaaatttaatttctactaagtgtagatttttttnnnnnnnnnnaagcttggcgtggatccgatatcaactagatcttgagacaaatggcagtattcatccacaattttaaaagaaaaggggggattggggggtacagtgcaggggaaagaatagtagacataatagcaacagacatacaaactaaag

SEQ ID NO: 20903 - DNA, 301 bp, Artificial Sequence
  NTC.29_NTC.4
  crRNA array
  misc_feature (148)..(157): n is a, c, g, or t
cttggctttatatatcttgtggaaaggacgaaacaccgtaatttctactaagtgtagatcgcgatctataccgtctatataatttctactaagtgtagatatacccgtcgcgaacgtgagtaatttctactaagtgtagatttttttnnnnnnnnnnaagcttggcgtggatccgatatcaactagatcttgagacaaatggcagtattcatccacaattttaaaagaaaaggggggattggggggtacagtgcaggggaaagaatagtagacataatagcaacagacatacaaactaaag

SEQ ID NO: 20904 - DNA, 301 bp, Artificial Sequence
  NTC.29_NTC.42
  crRNA array
  misc_feature (148)..(157): n is a, c, g, or t
cttggctttatatatcttgtggaaaggacgaaacaccgtaatttctactaagtgtagatcgcgatctataccgtctatataatttctactaagtgtagatggtcaaatcgcggcgataactaatttctactaagtgtagatttttttnnnnnnnnnnaagcttggcgtggatccgatatcaactagatcttgagacaaatggcagtattcatccacaattttaaaagaaaaggggggattggggggtacagtgcaggggaaagaatagtagacataatagcaacagacatacaaactaaag

SEQ ID NO: 20905 - DNA, 301 bp, Artificial Sequence
  NTC.29_NTC.22
  crRNA array
  misc_feature (148)..(157): n is a, c, g, or t
cttggctttatatatcttgtggaaaggacgaaacaccgtaatttctactaagtgtagatcgcgatctataccgtctatataatttctactaagtgtagatgcgcgtcaacgtaatgtgcctaatttctactaagtgtagatttttttnnnnnnnnnnaagcttggcgtggatccgatatcaactagatcttgagacaaatggcagtattcatccacaattttaaaagaaaaggggggattggggggtacagtgcaggggaaagaatagtagacataatagcaacagacatacaaactaaag

SEQ ID NO: 20906 - DNA, 301 bp, Artificial Sequence
  NTC.29_NTC.17
  crRNA array
  misc_feature (148)..(157): n is a, c, g, or t
cttggctttatatatcttgtggaaaggacgaaacaccgtaatttctactaagtgtagatcgcgatctataccgtctatataatttctactaagtgtagattatcgaacgctatcgaacgttaatttctactaagtgtagatttttttnnnnnnnnnnaagcttggcgtggatccgatatcaactagatcttgagacaaatggcagtattcatccacaattttaaaagaaaaggggggattggggggtacagtgcaggggaaagaatagtagacataatagcaacagacatacaaactaaag

SEQ ID NO: 20907 - DNA, 301 bp, Artificial Sequence
  NTC.29_NTC.9
  crRNA array
  misc_feature (148)..(157): n is a, c, g, or t
cttggctttatatatcttgtggaaaggacgaaacaccgtaatttctactaagtgtagatcgcgatctataccgtctatataatttctactaagtgtagatatcgccgtacggctatggcataatttctactaagtgtagatttttttnnnnnnnnnnaagcttggcgtggatccgatatcaactagatcttgagacaaatggcagtattcatccacaattttaaaagaaaaggggggattggggggtacagtgcaggggaaagaatagtagacataatagcaacagacatacaaactaaag

SEQ ID NO: 20908 - DNA, 301 bp, Artificial Sequence
  NTC.29_NTC.30
  crRNA array
  misc_feature (148)..(157): n is a, c, g, or t
cttggctttatatatcttgtggaaaggacgaaacaccgtaatttctactaagtgtagatcgcgatctataccgtctatataatttctactaagtgtagatcgatcgtacgggtgtcctaataatttctactaagtgtagatttttttnnnnnnnnnnaagcttggcgtggatccgatatcaactagatcttgagacaaatggcagtattcatccacaattttaaaagaaaaggggggattggggggtacagtgcaggggaaagaatagtagacataatagcaacagacatacaaactaaag

SEQ ID NO: 20909 - DNA, 301 bp, Artificial Sequence
  NTC.29_NTC.8
  crRNA array
  misc_feature (148)..(157): n is a, c, g, or t
cttggctttatatatcttgtggaaaggacgaaacaccgtaatttctactaagtgtagatcgcgatctataccgtctatataatttctactaagtgtagatcgaccgaggttacgctgggataatttctactaagtgtagatttttttnnnnnnnnnnaagcttggcgtggatccgatatcaactagatcttgagacaaatggcagtattcatccacaattttaaaagaaaaggggggattggggggtacagtgcaggggaaagaatagtagacataatagcaacagacatacaaactaaag

SEQ ID NO: 20910 - DNA, 301 bp, Artificial Sequence
  NTC.29_NTC.46
  crRNA array
  misc_feature (148)..(157): n is a, c, g, or t
cttggctttatatatcttgtggaaaggacgaaacaccgtaatttctactaagtgtagatcgcgatctataccgtctatataatttctactaagtgtagatagcgggtcgtagacgcgcggtaatttctactaagtgtagatttttttnnnnnnnnnnaagcttggcgtggatccgatatcaactagatcttgagacaaatggcagtattcatccacaattttaaaagaaaaggggggattggggggtacagtgcaggggaaagaatagtagacataatagcaacagacatacaaactaaag

SEQ ID NO: 20911 - DNA, 301 bp, Artificial Sequence
  NTC.29_NTC.35
  crRNA array
  misc_feature (148)..(157): n is a, c, g, or t
cttggctttatatatcttgtggaaaggacgaaacaccgtaatttctactaagtgtagatcgcgatctataccgtctatataatttctactaagtgtagattggcgcgtaatcgctattcgtaatttctactaagtgtagatttttttnnnnnnnnnnaagcttggcgtggatccgatatcaactagatcttgagacaaatggcagtattcatccacaattttaaaagaaaaggggggattggggggtacagtgcaggggaaagaatagtagacataatagcaacagacatacaaactaaag

SEQ ID NO: 20912 - DNA, 301 bp, Artificial Sequence
  NTC.29_NTC.10
  crRNA array
  misc_feature (148)..(157): n is a, c, g, or t
cttggctttatatatcttgtggaaaggacgaaacaccgtaatttctactaagtgtagatcgcgatctataccgtctatataatttctactaagtgtagatcgctaagttcgcgcgggccgtaatttctactaagtgtagatttttttnnnnnnnnnnaagcttggcgtggatccgatatcaactagatcttgagacaaatggcagtattcatccacaattttaaaagaaaaggggggattggggggtacagtgcaggggaaagaatagtagacataatagcaacagacatacaaactaaag

SEQ ID NO: 20913 - DNA, 301 bp, Artificial Sequence
  NTC.29_NTC.11
  crRNA array
  misc_feature (148)..(157): n is a, c, g, or t
cttggctttatatatcttgtggaaaggacgaaacaccgtaatttctactaagtgtagatcgcgatctataccgtctatataatttctactaagtgtagatcgttcgtcgacgaagcaatctaatttctactaagtgtagatttttttnnnnnnnnnnaagcttggcgtggatccgatatcaactagatcttgagacaaatggcagtattcatccacaattttaaaagaaaaggggggattggggggtacagtgcaggggaaagaatagtagacataatagcaacagacatacaaactaaag

SEQ ID NO: 20914 - DNA, 301 bp, Artificial Sequence
  NTC.29_NTC.14
  crRNA array
  misc_feature (148)..(157): n is a, c, g, or t
cttggctttatatatcttgtggaaaggacgaaacaccgtaatttctactaagtgtagatcgcgatctataccgtctatataatttctactaagtgtagatccgttcgtgcgatagtgttttaatttctactaagtgtagatttttttnnnnnnnnnnaagcttggcgtggatccgatatcaactagatcttgagacaaatggcagtattcatccacaattttaaaagaaaaggggggattggggggtacagtgcaggggaaagaatagtagacataatagcaacagacatacaaactaaag

SEQ ID NO: 20915 - DNA, 301 bp, Artificial Sequence
  NTC.29_NTC.28
  crRNA array
  misc_feature (148)..(157): n is a, c, g, or t
cttggctttatatatcttgtggaaaggacgaaacaccgtaatttctactaagtgtagatcgcgatctataccgtctatataatttctactaagtgtagataccgctaatcggcgtaaacttaatttctactaagtgtagatttttttnnnnnnnnnnaagcttggcgtggatccgatatcaactagatcttgagacaaatggcagtattcatccacaattttaaaagaaaaggggggattggggggtacagtgcaggggaaagaatagtagacataatagcaacagacatacaaactaaag

SEQ ID NO: 20916 - DNA, 301 bp, Artificial Sequence
  NTC.25_NTC.3
  crRNA array
  misc_feature (148)..(157): n is a, c, g, or t
cttggctttatatatcttgtggaaaggacgaaacaccgtaatttctactaagtgtagattcgcgttatcgtgccgtgcgtaatttctactaagtgtagattcgacgcgagacgacgtacataatttctactaagtgtagatttttttnnnnnnnnnnaagcttggcgtggatccgatatcaactagatcttgagacaaatggcagtattcatccacaattttaaaagaaaaggggggattggggggtacagtgcaggggaaagaatagtagacataatagcaacagacatacaaactaaag

SEQ ID NO: 20917 - DNA, 301 bp, Artificial Sequence
  NTC.25_NTC.47
  crRNA array
  misc_feature (148)..(157): n is a, c, g, or t
cttggctttatatatcttgtggaaaggacgaaacaccgtaatttctactaagtgtagattcgcgttatcgtgccgtgcgtaatttctactaagtgtagattctcgtatcgcgattgttaataatttctactaagtgtagatttttttnnnnnnnnnnaagcttggcgtggatccgatatcaactagatcttgagacaaatggcagtattcatccacaattttaaaagaaaaggggggattggggggtacagtgcaggggaaagaatagtagacataatagcaacagacatacaaactaaag

SEQ ID NO: 20918 - DNA, 301 bp, Artificial Sequence
  NTC.25_NTC.32
  crRNA array
  misc_feature (148)..(157): n is a, c, g, or t
cttggctttatatatcttgtggaaaggacgaaacaccgtaatttctactaagtgtagattcgcgttatcgtgccgtgcgtaatttctactaagtgtagatgcacgttacgcccgggtcactaatttctactaagtgtagatttttttnnnnnnnnnnaagcttggcgtggatccgatatcaactagatcttgagacaaatggcagtattcatccacaattttaaaagaaaaggggggattggggggtacagtgcaggggaaagaatagtagacataatagcaacagacatacaaactaaag

SEQ ID NO: 20919 - DNA, 301 bp, Artificial Sequence
  NTC.25_NTC.40
  crRNA array
  misc_feature (148)..(157): n is a, c, g, or t
cttggctttatatatcttgtggaaaggacgaaacaccgtaatttctactaagtgtagattcgcgttatcgtgccgtgcgtaatttctactaagtgtagatattcgcgaacccggccggaataatttctactaagtgtagatttttttnnnnnnnnnnaagcttggcgtggatccgatatcaactagatcttgagacaaatggcagtattcatccacaattttaaaagaaaaggggggattggggggtacagtgcaggggaaagaatagtagacataatagcaacagacatacaaactaaag

SEQ ID NO: 20920 - DNA, 301 bp, Artificial Sequence
  NTC.25_NTC.5
  crRNA array
  misc_feature (148)..(157): n is a, c, g, or t
cttggctttatatatcttgtggaaaggacgaaacaccgtaatttctactaagtgtagattcgcgttatcgtgccgtgcgtaatttctactaagtgtagatgcttacgcgtcgcgaatgtataatttctactaagtgtagatttttttnnnnnnnnnnaagcttggcgtggatccgatatcaactagatcttgagacaaatggcagtattcatccacaattttaaaagaaaaggggggattggggggtacagtgcaggggaaagaatagtagacataatagcaacagacatacaaactaaag

SEQ ID NO: 20921 - DNA, 301 bp, Artificial Sequence
  NTC.25_NTC.33
  crRNA array
  misc_feature (148)..(157): n is a, c, g, or t
cttggctttatatatcttgtggaaaggacgaaacaccgtaatttctactaagtgtagattcgcgttatcgtgccgtgcgtaatttctactaagtgtagattaagcgaccgacgcattcgctaatttctactaagtgtagatttttttnnnnnnnnnnaagcttggcgtggatccgatatcaactagatcttgagacaaatggcagtattcatccacaattttaaaagaaaaggggggattggggggtacagtgcaggggaaagaatagtagacataatagcaacagacatacaaactaaag

SEQ ID NO: 20922 - DNA, 301 bp, Artificial Sequence
  NTC.25_NTC.1
  crRNA array
  misc_feature (148)..(157): n is a, c, g, or t
cttggctttatatatcttgtggaaaggacgaaacaccgtaatttctactaagtgtagattcgcgttatcgtgccgtgcgtaatttctactaagtgtagatcgcgtaaccgttccggctcctaatttctactaagtgtagatttttttnnnnnnnnnnaagcttggcgtggatccgatatcaactagatcttgagacaaatggcagtattcatccacaattttaaaagaaaaggggggattggggggtacagtgcaggggaaagaatagtagacataatagcaacagacatacaaactaaag

SEQ ID NO: 20923 - DNA, 301 bp, Artificial Sequence
  NTC.25_NTC.6
  crRNA array
  misc_feature (148)..(157): n is a, c, g, or t
cttggctttatatatcttgtggaaaggacgaaacaccgtaatttctactaagtgtagattcgcgttatcgtgccgtgcgtaatttctactaagtgtagatcgaatcgcgcctacgggaattaatttctactaagtgtagatttttttnnnnnnnnnnaagcttggcgtggatccgatatcaactagatcttgagacaaatggcagtattcatccacaattttaaaagaaaaggggggattggggggtacagtgcaggggaaagaatagtagacataatagcaacagacatacaaactaaag

SEQ ID NO: 20924 - DNA, 301 bp, Artificial Sequence
  NTC.25_NTC.38
  crRNA array
  misc_feature (148)..(157): n is a, c, g, or t
cttggctttatatatcttgtggaaaggacgaaacaccgtaatttctactaagtgtagattcgcgttatcgtgccgtgcgtaatttctactaagtgtagataacggagcgcgatactaccataatttctactaagtgtagatttttttnnnnnnnnnnaagcttggcgtggatccgatatcaactagatcttgagacaaatggcagtattcatccacaattttaaaagaaaaggggggattggggggtacagtgcaggggaaagaatagtagacataatagcaacagacatacaaactaaag

SEQ ID NO: 20925 - DNA, 301 bp, Artificial Sequence
  NTC.25_NTC.41
  crRNA array
  misc_feature (148)..(157): n is a, c, g, or t
cttggctttatatatcttgtggaaaggacgaaacaccgtaatttctactaagtgtagattcgcgttatcgtgccgtgcgtaatttctactaagtgtagatttgatggcgcgacgcgttattaatttctactaagtgtagatttttttnnnnnnnnnnaagcttggcgtggatccgatatcaactagatcttgagacaaatggcagtattcatccacaattttaaaagaaaaggggggattggggggtacagtgcaggggaaagaatagtagacataatagcaacagacatacaaactaaag

SEQ ID NO: 20926 - DNA, 301 bp, Artificial Sequence
  NTC.25_NTC.18
  crRNA array
  misc_feature (148)..(157): n is a, c, g, or t
cttggctttatatatcttgtggaaaggacgaaacaccgtaatttctactaagtgtagattcgcgttatcgtgccgtgcgtaatttctactaagtgtagattccggttacgaccggcaaaataatttctactaagtgtagatttttttnnnnnnnnnnaagcttggcgtggatccgatatcaactagatcttgagacaaatggcagtattcatccacaattttaaaagaaaaggggggattggggggtacagtgcaggggaaagaatagtagacataatagcaacagacatacaaactaaag

SEQ ID NO: 20927 - DNA, 301 bp, Artificial Sequence
  NTC.25_NTC.24
  crRNA array
  misc_feature (148)..(157): n is a, c, g, or t
cttggctttatatatcttgtggaaaggacgaaacaccgtaatttctactaagtgtagattcgcgttatcgtgccgtgcgtaatttctactaagtgtagatactatcgacgttcgtcccggtaatttctactaagtgtagatttttttnnnnnnnnnnaagcttggcgtggatccgatatcaactagatcttgagacaaatggcagtattcatccacaattttaaaagaaaaggggggattggggggtacagtgcaggggaaagaatagtagacataatagcaacagacatacaaactaaag

SEQ ID NO: 20928 - DNA, 301 bp, Artificial Sequence
  NTC.25_NTC.31
  crRNA array
  misc_feature (148)..(157): n is a, c, g, or t
cttggctttatatatcttgtggaaaggacgaaacaccgtaatttctactaagtgtagattcgcgttatcgtgccgtgcgtaatttctactaagtgtagatgccgaccgcgtgattgtaggtaatttctactaagtgtagatttttttnnnnnnnnnnaagcttggcgtggatccgatatcaactagatcttgagacaaatggcagtattcatccacaattttaaaagaaaaggggggattggggggtacagtgcaggggaaagaatagtagacataatagcaacagacatacaaactaaag

SEQ ID NO: 20929 - DNA, 301 bp, Artificial Sequence
  NTC.25_NTC.51
  crRNA array
  misc_feature (148)..(157): n is a, c, g, or t
cttggctttatatatcttgtggaaaggacgaaacaccgtaatttctactaagtgtagattcgcgttatcgtgccgtgcgtaatttctactaagtgtagattaacgcgcaacacgccaatgtaatttctactaagtgtagatttttttnnnnnnnnnnaagcttggcgtggatccgatatcaactagatcttgagacaaatggcagtattcatccacaattttaaaagaaaaggggggattggggggtacagtgcaggggaaagaatagtagacataatagcaacagacatacaaactaaag

SEQ ID NO: 20930 - DNA, 301 bp, Artificial Sequence
  NTC.25_NTC.23
  crRNA array
  misc_feature (148)..(157): n is a, c, g, or t
cttggctttatatatcttgtggaaaggacgaaacaccgtaatttctactaagtgtagattcgcgttatcgtgccgtgcgtaatttctactaagtgtagatacgcgctattatcgtaggtgtaatttctactaagtgtagatttttttnnnnnnnnnnaagcttggcgtggatccgatatcaactagatcttgagacaaatggcagtattcatccacaattttaaaagaaaaggggggattggggggtacagtgcaggggaaagaatagtagacataatagcaacagacatacaaactaaag

SEQ ID NO: 20931 - DNA, 301 bp, Artificial Sequence
  NTC.25_NTC.36
  crRNA array
  misc_feature (148)..(157): n is a, c, g, or t
cttggctttatatatcttgtggaaaggacgaaacaccgtaatttctactaagtgtagattcgcgttatcgtgccgtgcgtaatttctactaagtgtagatcaacccgccgtagcgggccttaatttctactaagtgtagatttttttnnnnnnnnnnaagcttggcgtggatccgatatcaactagatcttgagacaaatggcagtattcatccacaattttaaaagaaaaggggggattggggggtacagtgcaggggaaagaatagtagacataatagcaacagacatacaaactaaag

SEQ ID NO: 20932 - DNA, 301 bp, Artificial Sequence
  NTC.25_NTC.15
  crRNA array
  misc_feature (148)..(157): n is a, c, g, or t
cttggctttatatatcttgtggaaaggacgaaacaccgtaatttctactaagtgtagattcgcgttatcgtgccgtgcgtaatttctactaagtgtagatgttgtcgtgccgcgaatttataatttctactaagtgtagatttttttnnnnnnnnnnaagcttggcgtggatccgatatcaactagatcttgagacaaatggcagtattcatccacaattttaaaagaaaaggggggattggggggtacagtgcaggggaaagaatagtagacataatagcaacagacatacaaactaaag

SEQ ID NO: 20933 - DNA, 301 bp, Artificial Sequence
  NTC.25_NTC.45
  crRNA array
  misc_feature (148)..(157): n is a, c, g, or t
cttggctttatatatcttgtggaaaggacgaaacaccgtaatttctactaagtgtagattcgcgttatcgtgccgtgcgtaatttctactaagtgtagatcggaacgcgtgatactagggtaatttctactaagtgtagatttttttnnnnnnnnnnaagcttggcgtggatccgatatcaactagatcttgagacaaatggcagtattcatccacaattttaaaagaaaaggggggattggggggtacagtgcaggggaaagaatagtagacataatagcaacagacatacaaactaaag

SEQ ID NO: 20934 - DNA, 301 bp, Artificial Sequence
  NTC.25_NTC.12
  crRNA array
  misc_feature (148)..(157): n is a, c, g, or t
cttggctttatatatcttgtggaaaggacgaaacaccgtaatttctactaagtgtagattcgcgttatcgtgccgtgcgtaatttctactaagtgtagatcgccgacgattaatcaatagtaatttctactaagtgtagatttttttnnnnnnnnnnaagcttggcgtggatccgatatcaactagatcttgagacaaatggcagtattcatccacaattttaaaagaaaaggggggattggggggtacagtgcaggggaaagaatagtagacataatagcaacagacatacaaactaaag

SEQ ID NO: 20935 - DNA, 301 bp, Artificial Sequence
  NTC.25_NTC.19
  crRNA array
  misc_feature (148)..(157): n is a, c, g, or t
cttggctttatatatcttgtggaaaggacgaaacaccgtaatttctactaagtgtagattcgcgttatcgtgccgtgcgtaatttctactaagtgtagatcgtcgtagaacgatacccgataatttctactaagtgtagatttttttnnnnnnnnnnaagcttggcgtggatccgatatcaactagatcttgagacaaatggcagtattcatccacaattttaaaagaaaaggggggattggggggtacagtgcaggggaaagaatagtagacataatagcaacagacatacaaactaaag

SEQ ID NO: 20936 - DNA, 301 bp, Artificial Sequence
  NTC.25_NTC.20
  crRNA array
  misc_feature (148)..(157): n is a, c, g, or t
cttggctttatatatcttgtggaaaggacgaaacaccgtaatttctactaagtgtagattcgcgttatcgtgccgtgcgtaatttctactaagtgtagatattccggcgcgaccagaagataatttctactaagtgtagatttttttnnnnnnnnnnaagcttggcgtggatccgatatcaactagatcttgagacaaatggcagtattcatccacaattttaaaagaaaaggggggattggggggtacagtgcaggggaaagaatagtagacataatagcaacagacatacaaactaaag

SEQ ID NO: 20937 - DNA, 301 bp, Artificial Sequence
  NTC.25_NTC.48
  crRNA array
  misc_feature (148)..(157): n is a, c, g, or t
cttggctttatatatcttgtggaaaggacgaaacaccgtaatttctactaagtgtagattcgcgttatcgtgccgtgcgtaatttctactaagtgtagatcggtcgactacggctgttagtaatttctactaagtgtagatttttttnnnnnnnnnnaagcttggcgtggatccgatatcaactagatcttgagacaaatggcagtattcatccacaattttaaaagaaaaggggggattggggggtacagtgcaggggaaagaatagtagacataatagcaacagacatacaaactaaag

SEQ ID NO: 20938 - DNA, 301 bp, Artificial Sequence
  NTC.25_NTC.26
  crRNA array
  misc_feature (148)..(157): n is a, c, g, or t
cttggctttatatatcttgtggaaaggacgaaacaccgtaatttctactaagtgtagattcgcgttatcgtgccgtgcgtaatttctactaagtgtagatcgcgacggcggttttaacactaatttctactaagtgtagatttttttnnnnnnnnnnaagcttggcgtggatccgatatcaactagatcttgagacaaatggcagtattcatccacaattttaaaagaaaaggggggattggggggtacagtgcaggggaaagaatagtagacataatagcaacagacatacaaactaaag

SEQ ID NO: 20939 - DNA, 301 bp, Artificial Sequence
  NTC.25_NTC.27
  crRNA array
  misc_feature (148)..(157): n is a, c, g, or t
cttggctttatatatcttgtggaaaggacgaaacaccgtaatttctactaagtgtagattcgcgttatcgtgccgtgcgtaatttctactaagtgtagatgtcgcgttgcgaccggcgcttaatttctactaagtgtagatttttttnnnnnnnnnnaagcttggcgtggatccgatatcaactagatcttgagacaaatggcagtattcatccacaattttaaaagaaaaggggggattggggggtacagtgcaggggaaagaatagtagacataatagcaacagacatacaaactaaag

SEQ ID NO: 20940 - DNA, 301 bp, Artificial Sequence
  NTC.25_NTC.34
  crRNA array
  misc_feature (148)..(157): n is a, c, g, or t
cttggctttatatatcttgtggaaaggacgaaacaccgtaatttctactaagtgtagattcgcgttatcgtgccgtgcgtaatttctactaagtgtagattagcgttcgacacgtgaaactaatttctactaagtgtagatttttttnnnnnnnnnnaagcttggcgtggatccgatatcaactagatcttgagacaaatggcagtattcatccacaattttaaaagaaaaggggggattggggggtacagtgcaggggaaagaatagtagacataatagcaacagacatacaaactaaag

SEQ ID NO: 20941 - DNA, 301 bp, Artificial Sequence
  NTC.25_NTC.16
  crRNA array
  misc_feature (148)..(157): n is a, c, g, or t
cttggctttatatatcttgtggaaaggacgaaacaccgtaatttctactaagtgtagattcgcgttatcgtgccgtgcgtaatttctactaagtgtagatcggtacgttagacgaaaatttaatttctactaagtgtagatttttttnnnnnnnnnnaagcttggcgtggatccgatatcaactagatcttgagacaaatggcagtattcatccacaattttaaaagaaaaggggggattggggggtacagtgcaggggaaagaatagtagacataatagcaacagacatacaaactaaag

SEQ ID NO: 20942 - DNA, 301 bp, Artificial Sequence
  NTC.25_NTC.4
  crRNA array
  misc_feature (148)..(157): n is a, c, g, or t
cttggctttatatatcttgtggaaaggacgaaacaccgtaatttctactaagtgtagattcgcgttatcgtgccgtgcgtaatttctactaagtgtagatatacccgtcgcgaacgtgagtaatttctactaagtgtagatttttttnnnnnnnnnnaagcttggcgtggatccgatatcaactagatcttgagacaaatggcagtattcatccacaattttaaaagaaaaggggggattggggggtacagtgcaggggaaagaatagtagacataatagcaacagacatacaaactaaag

SEQ ID NO: 20943 - DNA, 301 bp, Artificial Sequence
  NTC.25_NTC.42
  crRNA array
  misc_feature (148)..(157): n is a, c, g, or t
cttggctttatatatcttgtggaaaggacgaaacaccgtaatttctactaagtgtagattcgcgttatcgtgccgtgcgtaatttctactaagtgtagatggtcaaatcgcggcgataactaatttctactaagtgtagatttttttnnnnnnnnnnaagcttggcgtggatccgatatcaactagatcttgagacaaatggcagtattcatccacaattttaaaagaaaaggggggattggggggtacagtgcaggggaaagaatagtagacataatagcaacagacatacaaactaaag

SEQ ID NO: 20944 - DNA, 301 bp, Artificial Sequence
  NTC.25_NTC.22
  crRNA array
  misc_feature (148)..(157): n is a, c, g, or t
cttggctttatatatcttgtggaaaggacgaaacaccgtaatttctactaagtgtagattcgcgttatcgtgccgtgcgtaatttctactaagtgtagatgcgcgtcaacgtaatgtgcctaatttctactaagtgtagatttttttnnnnnnnnnnaagcttggcgtggatccgatatcaactagatcttgagacaaatggcagtattcatccacaattttaaaagaaaaggggggattggggggtacagtgcaggggaaagaatagtagacataatagcaacagacatacaaactaaag

SEQ ID NO: 20945 - DNA, 301 bp, Artificial Sequence
  NTC.25_NTC.17
  crRNA array
  misc_feature (148)..(157): n is a, c, g, or t
cttggctttatatatcttgtggaaaggacgaaacaccgtaatttctactaagtgtagattcgcgttatcgtgccgtgcgtaatttctactaagtgtagattatcgaacgctatcgaacgttaatttctactaagtgtagatttttttnnnnnnnnnnaagcttggcgtggatccgatatcaactagatcttgagacaaatggcagtattcatccacaattttaaaagaaaaggggggattggggggtacagtgcaggggaaagaatagtagacataatagcaacagacatacaaactaaag

SEQ ID NO: 20946 - DNA, 301 bp, Artificial Sequence
  NTC.25_NTC.9
  crRNA array
  misc_feature (148)..(157): n is a, c, g, or t
cttggctttatatatcttgtggaaaggacgaaacaccgtaatttctactaagtgtagattcgcgttatcgtgccgtgcgtaatttctactaagtgtagatatcgccgtacggctatggcataatttctactaagtgtagatttttttnnnnnnnnnnaagcttggcgtggatccgatatcaactagatcttgagacaaatggcagtattcatccacaattttaaaagaaaaggggggattggggggtacagtgcaggggaaagaatagtagacataatagcaacagacatacaaactaaag

SEQ ID NO: 20947 - DNA, 301 bp, Artificial Sequence
  NTC.25_NTC.30
  crRNA array
  misc_feature (148)..(157): n is a, c, g, or t
cttggctttatatatcttgtggaaaggacgaaacaccgtaatttctactaagtgtagattcgcgttatcgtgccgtgcgtaatttctactaagtgtagatcgatcgtacgggtgtcctaataatttctactaagtgtagatttttttnnnnnnnnnnaagcttggcgtggatccgatatcaactagatcttgagacaaatggcagtattcatccacaattttaaaagaaaaggggggattggggggtacagtgcaggggaaagaatagtagacataatagcaacagacatacaaactaaag

SEQ ID NO: 20948 - DNA, 301 bp, Artificial Sequence
  NTC.25_NTC.8
  crRNA array
  misc_feature (148)..(157): n is a, c, g, or t
cttggctttatatatcttgtggaaaggacgaaacaccgtaatttctactaagtgtagattcgcgttatcgtgccgtgcgtaatttctactaagtgtagatcgaccgaggttacgctgggataatttctactaagtgtagatttttttnnnnnnnnnnaagcttggcgtggatccgatatcaactagatcttgagacaaatggcagtattcatccacaattttaaaagaaaaggggggattggggggtacagtgcaggggaaagaatagtagacataatagcaacagacatacaaactaaag

SEQ ID NO: 20949 - DNA, 301 bp, Artificial Sequence
  NTC.25_NTC.46
  crRNA array
  misc_feature (148)..(157): n is a, c, g, or t
cttggctttatatatcttgtggaaaggacgaaacaccgtaatttctactaagtgtagattcgcgttatcgtgccgtgcgtaatttctactaagtgtagatagcgggtcgtagacgcgcggtaatttctactaagtgtagatttttttnnnnnnnnnnaagcttggcgtggatccgatatcaactagatcttgagacaaatggcagtattcatccacaattttaaaagaaaaggggggattggggggtacagtgcaggggaaagaatagtagacataatagcaacagacatacaaactaaag

SEQ ID NO: 20950 - DNA, 301 bp, Artificial Sequence
  NTC.25_NTC.35
  crRNA array
  misc_feature (148)..(157): n is a, c, g, or t
cttggctttatatatcttgtggaaaggacgaaacaccgtaatttctactaagtgtagattcgcgttatcgtgccgtgcgtaatttctactaagtgtagattggcgcgtaatcgctattcgtaatttctactaagtgtagatttttttnnnnnnnnnnaagcttggcgtggatccgatatcaactagatcttgagacaaatggcagtattcatccacaattttaaaagaaaaggggggattggggggtacagtgcaggggaaagaatagtagacataatagcaacagacatacaaactaaag

SEQ ID NO: 20951 - DNA, 301 bp, Artificial Sequence
  NTC.25_NTC.10
  crRNA array
  misc_feature (148)..(157): n is a, c, g, or t
cttggctttatatatcttgtggaaaggacgaaacaccgtaatttctactaagtgtagattcgcgttatcgtgccgtgcgtaatttctactaagtgtagatcgctaagttcgcgcgggccgtaatttctactaagtgtagatttttttnnnnnnnnnnaagcttggcgtggatccgatatcaactagatcttgagacaaatggcagtattcatccacaattttaaaagaaaaggggggattggggggtacagtgcaggggaaagaatagtagacataatagcaacagacatacaaactaaag

SEQ ID NO: 20952 - DNA, 301 bp, Artificial Sequence
  NTC.25_NTC.11
  crRNA array
  misc_feature (148)..(157): n is a, c, g, or t
cttggctttatatatcttgtggaaaggacgaaacaccgtaatttctactaagtgtagattcgcgttatcgtgccgtgcgtaatttctactaagtgtagatcgttcgtcgacgaagcaatctaatttctactaagtgtagatttttttnnnnnnnnnnaagcttggcgtggatccgatatcaactagatcttgagacaaatggcagtattcatccacaattttaaaagaaaaggggggattggggggtacagtgcaggggaaagaatagtagacataatagcaacagacatacaaactaaag

SEQ ID NO: 20953 - DNA, 301 bp, Artificial Sequence
  NTC.25_NTC.14
  crRNA array
  misc_feature (148)..(157): n is a, c, g, or t
cttggctttatatatcttgtggaaaggacgaaacaccgtaatttctactaagtgtagattcgcgttatcgtgccgtgcgtaatttctactaagtgtagatccgttcgtgcgatagtgttttaatttctactaagtgtagatttttttnnnnnnnnnnaagcttggcgtggatccgatatcaactagatcttgagacaaatggcagtattcatccacaattttaaaagaaaaggggggattggggggtacagtgcaggggaaagaatagtagacataatagcaacagacatacaaactaaag

SEQ ID NO: 20954 - DNA, 301 bp, Artificial Sequence
  NTC.25_NTC.28
  crRNA array
  misc_feature (148)..(157): n is a, c, g, or t
cttggctttatatatcttgtggaaaggacgaaacaccgtaatttctactaagtgtagattcgcgttatcgtgccgtgcgtaatttctactaagtgtagataccgctaatcggcgtaaacttaatttctactaagtgtagatttttttnnnnnnnnnnaagcttggcgtggatccgatatcaactagatcttgagacaaatggcagtattcatccacaattttaaaagaaaaggggggattggggggtacagtgcaggggaaagaatagtagacataatagcaacagacatacaaactaaag

SEQ ID NO: 20955 - DNA, 301 bp, Artificial Sequence
  NTC.3_NTC.47
  crRNA array
  misc_feature (148)..(157): n is a, c, g, or t
cttggctttatatatcttgtggaaaggacgaaacaccgtaatttctactaagtgtagattcgacgcgagacgacgtacataatttctactaagtgtagattctcgtatcgcgattgttaataatttctactaagtgtagatttttttnnnnnnnnnnaagcttggcgtggatccgatatcaactagatcttgagacaaatggcagtattcatccacaattttaaaagaaaaggggggattggggggtacagtgcaggggaaagaatagtagacataatagcaacagacatacaaactaaag

SEQ ID NO: 20956 - DNA, 301 bp, Artificial Sequence
  NTC.3_NTC.32
  crRNA array
  misc_feature (148)..(157): n is a, c, g, or t
cttggctttatatatcttgtggaaaggacgaaacaccgtaatttctactaagtgtagattcgacgcgagacgacgtacataatttctactaagtgtagatgcacgttacgcccgggtcactaatttctactaagtgtagatttttttnnnnnnnnnnaagcttggcgtggatccgatatcaactagatcttgagacaaatggcagtattcatccacaattttaaaagaaaaggggggattggggggtacagtgcaggggaaagaatagtagacataatagcaacagacatacaaactaaag

SEQ ID NO: 20957 - DNA, 301 bp, Artificial Sequence
  NTC.3_NTC.40
  crRNA array
  misc_feature (148)..(157): n is a, c, g, or t
cttggctttatatatcttgtggaaaggacgaaacaccgtaatttctactaagtgtagattcgacgcgagacgacgtacataatttctactaagtgtagatattcgcgaacccggccggaataatttctactaagtgtagatttttttnnnnnnnnnnaagcttggcgtggatccgatatcaactagatcttgagacaaatggcagtattcatccacaattttaaaagaaaaggggggattggggggtacagtgcaggggaaagaatagtagacataatagcaacagacatacaaactaaag

SEQ ID NO: 20958 - DNA, 301 bp, Artificial Sequence
  NTC.3_NTC.5
  crRNA array
  misc_feature (148)..(157): n is a, c, g, or t
cttggctttatatatcttgtggaaaggacgaaacaccgtaatttctactaagtgtagattcgacgcgagacgacgtacataatttctactaagtgtagatgcttacgcgtcgcgaatgtataatttctactaagtgtagatttttttnnnnnnnnnnaagcttggcgtggatccgatatcaactagatcttgagacaaatggcagtattcatccacaattttaaaagaaaaggggggattggggggtacagtgcaggggaaagaatagtagacataatagcaacagacatacaaactaaag

SEQ ID NO: 20959 - DNA, 301 bp, Artificial Sequence
  NTC.3_NTC.33
  crRNA array
  misc_feature (148)..(157): n is a, c, g, or t
cttggctttatatatcttgtggaaaggacgaaacaccgtaatttctactaagtgtagattcgacgcgagacgacgtacataatttctactaagtgtagattaagcgaccgacgcattcgctaatttctactaagtgtagatttttttnnnnnnnnnnaagcttggcgtggatccgatatcaactagatcttgagacaaatggcagtattcatccacaattttaaaagaaaaggggggattggggggtacagtgcaggggaaagaatagtagacataatagcaacagacatacaaactaaag

SEQ ID NO: 20960 - DNA, 301 bp, Artificial Sequence
  NTC.3_NTC.1
  crRNA array
  misc_feature (148)..(157): n is a, c, g, or t
cttggctttatatatcttgtggaaaggacgaaacaccgtaatttctactaagtgtagattcgacgcgagacgacgtacataatttctactaagtgtagatcgcgtaaccgttccggctcctaatttctactaagtgtagatttttttnnnnnnnnnnaagcttggcgtggatccgatatcaactagatcttgagacaaatggcagtattcatccacaattttaaaagaaaaggggggattggggggtacagtgcaggggaaagaatagtagacataatagcaacagacatacaaactaaag

SEQ ID NO: 20961 - DNA, 301 bp, Artificial Sequence
  NTC.3_NTC.6
  crRNA array
  misc_feature (148)..(157): n is a, c, g, or t
cttggctttatatatcttgtggaaaggacgaaacaccgtaatttctactaagtgtagattcgacgcgagacgacgtacataatttctactaagtgtagatcgaatcgcgcctacgggaattaatttctactaagtgtagatttttttnnnnnnnnnnaagcttggcgtggatccgatatcaactagatcttgagacaaatggcagtattcatccacaattttaaaagaaaaggggggattggggggtacagtgcaggggaaagaatagtagacataatagcaacagacatacaaactaaag

SEQ ID NO: 20962 - DNA, 301 bp, Artificial Sequence
  NTC.3_NTC.38
  crRNA array
  misc_feature (148)..(157): n is a, c, g, or t
cttggctttatatatcttgtggaaaggacgaaacaccgtaatttctactaagtgtagattcgacgcgagacgacgtacataatttctactaagtgtagataacggagcgcgatactaccataatttctactaagtgtagatttttttnnnnnnnnnnaagcttggcgtggatccgatatcaactagatcttgagacaaatggcagtattcatccacaattttaaaagaaaaggggggattggggggtacagtgcaggggaaagaatagtagacataatagcaacagacatacaaactaaag

SEQ ID NO: 20963 - DNA, 301 bp, Artificial Sequence
  NTC.3_NTC.41
  crRNA array
  misc_feature (148)..(157): n is a, c, g, or t
cttggctttatatatcttgtggaaaggacgaaacaccgtaatttctactaagtgtagattcgacgcgagacgacgtacataatttctactaagtgtagatttgatggcgcgacgcgttattaatttctactaagtgtagatttttttnnnnnnnnnnaagcttggcgtggatccgatatcaactagatcttgagacaaatggcagtattcatccacaattttaaaagaaaaggggggattggggggtacagtgcaggggaaagaatagtagacataatagcaacagacatacaaactaaag

SEQ ID NO: 20964 - DNA, 301 bp, Artificial Sequence
  NTC.3_NTC.18
  crRNA array
  misc_feature (148)..(157): n is a, c, g, or t
cttggctttatatatcttgtggaaaggacgaaacaccgtaatttctactaagtgtagattcgacgcgagacgacgtacataatttctactaagtgtagattccggttacgaccggcaaaataatttctactaagtgtagatttttttnnnnnnnnnnaagcttggcgtggatccgatatcaactagatcttgagacaaatggcagtattcatccacaattttaaaagaaaaggggggattggggggtacagtgcaggggaaagaatagtagacataatagcaacagacatacaaactaaag

SEQ ID NO: 20965 - DNA, 301 bp, Artificial Sequence
  NTC.3_NTC.24
  crRNA array
  misc_feature (148)..(157): n is a, c, g, or t
cttggctttatatatcttgtggaaaggacgaaacaccgtaatttctactaagtgtagattcgacgcgagacgacgtacataatttctactaagtgtagatactatcgacgttcgtcccggtaatttctactaagtgtagatttttttnnnnnnnnnnaagcttggcgtggatccgatatcaactagatcttgagacaaatggcagtattcatccacaattttaaaagaaaaggggggattggggggtacagtgcaggggaaagaatagtagacataatagcaacagacatacaaactaaag

SEQ ID NO: 20966 - DNA, 301 bp, Artificial Sequence
  NTC.3_NTC.31
  crRNA array
  misc_feature (148)..(157): n is a, c, g, or t
cttggctttatatatcttgtggaaaggacgaaacaccgtaatttctactaagtgtagattcgacgcgagacgacgtacataatttctactaagtgtagatgccgaccgcgtgattgtaggtaatttctactaagtgtagatttttttnnnnnnnnnnaagcttggcgtggatccgatatcaactagatcttgagacaaatggcagtattcatccacaattttaaaagaaaaggggggattggggggtacagtgcaggggaaagaatagtagacataatagcaacagacatacaaactaaag

SEQ ID NO: 20967 - DNA, 301 bp, Artificial Sequence
  NTC.3_NTC.51
  crRNA array
  misc_feature (148)..(157): n is a, c, g, or t
cttggctttatatatcttgtggaaaggacgaaacaccgtaatttctactaagtgtagattcgacgcgagacgacgtacataatttctactaagtgtagattaacgcgcaacacgccaatgtaatttctactaagtgtagatttttttnnnnnnnnnnaagcttggcgtggatccgatatcaactagatcttgagacaaatggcagtattcatccacaattttaaaagaaaaggggggattggggggtacagtgcaggggaaagaatagtagacataatagcaacagacatacaaactaaag

SEQ ID NO: 20968 - DNA, 301 bp, Artificial Sequence
  NTC.3_NTC.23
  crRNA array
  misc_feature (148)..(157): n is a, c, g, or t
cttggctttatatatcttgtggaaaggacgaaacaccgtaatttctactaagtgtagattcgacgcgagacgacgtacataatttctactaagtgtagatacgcgctattatcgtaggtgtaatttctactaagtgtagatttttttnnnnnnnnnnaagcttggcgtggatccgatatcaactagatcttgagacaaatggcagtattcatccacaattttaaaagaaaaggggggattggggggtacagtgcaggggaaagaatagtagacataatagcaacagacatacaaactaaag

SEQ ID NO: 20969 - DNA, 301 bp, Artificial Sequence
  NTC.3_NTC.36
  crRNA array
  misc_feature (148)..(157): n is a, c, g, or t
cttggctttatatatcttgtggaaaggacgaaacaccgtaatttctactaagtgtagattcgacgcgagacgacgtacataatttctactaagtgtagatcaacccgccgtagcgggccttaatttctactaagtgtagatttttttnnnnnnnnnnaagcttggcgtggatccgatatcaactagatcttgagacaaatggcagtattcatccacaattttaaaagaaaaggggggattggggggtacagtgcaggggaaagaatagtagacataatagcaacagacatacaaactaaag

SEQ ID NO: 20970 - DNA, 301 bp, Artificial Sequence
  NTC.3_NTC.15
  crRNA array
  misc_feature (148)..(157): n is a, c, g, or t
cttggctttatatatcttgtggaaaggacgaaacaccgtaatttctactaagtgtagattcgacgcgagacgacgtacataatttctactaagtgtagatgttgtcgtgccgcgaatttataatttctactaagtgtagatttttttnnnnnnnnnnaagcttggcgtggatccgatatcaactagatcttgagacaaatggcagtattcatccacaattttaaaagaaaaggggggattggggggtacagtgcaggggaaagaatagtagacataatagcaacagacatacaaactaaag

SEQ ID NO: 20971 - DNA, 301 bp, Artificial Sequence
  NTC.3_NTC.45
  crRNA array
  misc_feature (148)..(157): n is a, c, g, or t
cttggctttatatatcttgtggaaaggacgaaacaccgtaatttctactaagtgtagattcgacgcgagacgacgtacataatttctactaagtgtagatcggaacgcgtgatactagggtaatttctactaagtgtagatttttttnnnnnnnnnnaagcttggcgtggatccgatatcaactagatcttgagacaaatggcagtattcatccacaattttaaaagaaaaggggggattggggggtacagtgcaggggaaagaatagtagacataatagcaacagacatacaaactaaag

SEQ ID NO: 20972 - DNA, 301 bp, Artificial Sequence
  NTC.3_NTC.12
  crRNA array
  misc_feature (148)..(157): n is a, c, g, or t
cttggctttatatatcttgtggaaaggacgaaacaccgtaatttctactaagtgtagattcgacgcgagacgacgtacataatttctactaagtgtagatcgccgacgattaatcaatagtaatttctactaagtgtagatttttttnnnnnnnnnnaagcttggcgtggatccgatatcaactagatcttgagacaaatggcagtattcatccacaattttaaaagaaaaggggggattggggggtacagtgcaggggaaagaatagtagacataatagcaacagacatacaaactaaag

SEQ ID NO: 20973 - DNA, 301 bp, Artificial Sequence
  NTC.3_NTC.19
  crRNA array
  misc_feature (148)..(157): n is a, c, g, or t
cttggctttatatatcttgtggaaaggacgaaacaccgtaatttctactaagtgtagattcgacgcgagacgacgtacataatttctactaagtgtagatcgtcgtagaacgatacccgataatttctactaagtgtagatttttttnnnnnnnnnnaagcttggcgtggatccgatatcaactagatcttgagacaaatggcagtattcatccacaattttaaaagaaaaggggggattggggggtacagtgcaggggaaagaatagtagacataatagcaacagacatacaaactaaag

SEQ ID NO: 20974 - DNA, 301 bp, Artificial Sequence
  NTC.3_NTC.20
  crRNA array
  misc_feature (148)..(157): n is a, c, g, or t
cttggctttatatatcttgtggaaaggacgaaacaccgtaatttctactaagtgtagattcgacgcgagacgacgtacataatttctactaagtgtagatattccggcgcgaccagaagataatttctactaagtgtagatttttttnnnnnnnnnnaagcttggcgtggatccgatatcaactagatcttgagacaaatggcagtattcatccacaattttaaaagaaaaggggggattggggggtacagtgcaggggaaagaatagtagacataatagcaacagacatacaaactaaag

SEQ ID NO: 20975 - DNA, 301 bp, Artificial Sequence
  NTC.3_NTC.48
  crRNA array
  misc_feature (148)..(157): n is a, c, g, or t
cttggctttatatatcttgtggaaaggacgaaacaccgtaatttctactaagtgtagattcgacgcgagacgacgtacataatttctactaagtgtagatcggtcgactacggctgttagtaatttctactaagtgtagatttttttnnnnnnnnnnaagcttggcgtggatccgatatcaactagatcttgagacaaatggcagtattcatccacaattttaaaagaaaaggggggattggggggtacagtgcaggggaaagaatagtagacataatagcaacagacatacaaactaaag

SEQ ID NO: 20976 - DNA, 301 bp, Artificial Sequence
  NTC.3_NTC.26
  crRNA array
  misc_feature (148)..(157): n is a, c, g, or t
cttggctttatatatcttgtggaaaggacgaaacaccgtaatttctactaagtgtagattcgacgcgagacgacgtacataatttctactaagtgtagatcgcgacggcggttttaacactaatttctactaagtgtagatttttttnnnnnnnnnnaagcttggcgtggatccgatatcaactagatcttgagacaaatggcagtattcatccacaattttaaaagaaaaggggggattggggggtacagtgcaggggaaagaatagtagacataatagcaacagacatacaaactaaag

SEQ ID NO: 20977 - DNA, 301 bp, Artificial Sequence
  NTC.3_NTC.27
  crRNA array
  misc_feature (148)..(157): n is a, c, g, or t
cttggctttatatatcttgtggaaaggacgaaacaccgtaatttctactaagtgtagattcgacgcgagacgacgtacataatttctactaagtgtagatgtcgcgttgcgaccggcgcttaatttctactaagtgtagatttttttnnnnnnnnnnaagcttggcgtggatccgatatcaactagatcttgagacaaatggcagtattcatccacaattttaaaagaaaaggggggattggggggtacagtgcaggggaaagaatagtagacataatagcaacagacatacaaactaaag

SEQ ID NO: 20978 - DNA, 301 bp, Artificial Sequence
  NTC.3_NTC.34
  crRNA array
  misc_feature (148)..(157): n is a, c, g, or t
cttggctttatatatcttgtggaaaggacgaaacaccgtaatttctactaagtgtagattcgacgcgagacgacgtacataatttctactaagtgtagattagcgttcgacacgtgaaactaatttctactaagtgtagatttttttnnnnnnnnnnaagcttggcgtggatccgatatcaactagatcttgagacaaatggcagtattcatccacaattttaaaagaaaaggggggattggggggtacagtgcaggggaaagaatagtagacataatagcaacagacatacaaactaaag

SEQ ID NO: 20979 - DNA, 301 bp, Artificial Sequence
  NTC.3_NTC.16
  crRNA array
  misc_feature (148)..(157): n is a, c, g, or t
cttggctttatatatcttgtggaaaggacgaaacaccgtaatttctactaagtgtagattcgacgcgagacgacgtacataatttctactaagtgtagatcggtacgttagacgaaaatttaatttctactaagtgtagatttttttnnnnnnnnnnaagcttggcgtggatccgatatcaactagatcttgagacaaatggcagtattcatccacaattttaaaagaaaaggggggattggggggtacagtgcaggggaaagaatagtagacataatagcaacagacatacaaactaaag

SEQ ID NO: 20980 - DNA, 301 bp, Artificial Sequence
  NTC.3_NTC.4
  crRNA array
  misc_feature (148)..(157): n is a, c, g, or t
cttggctttatatatcttgtggaaaggacgaaacaccgtaatttctactaagtgtagattcgacgcgagacgacgtacataatttctactaagtgtagatatacccgtcgcgaacgtgagtaatttctactaagtgtagatttttttnnnnnnnnnnaagcttggcgtggatccgatatcaactagatcttgagacaaatggcagtattcatccacaattttaaaagaaaaggggggattggggggtacagtgcaggggaaagaatagtagacataatagcaacagacatacaaactaaag

SEQ ID NO: 20981 - DNA, 301 bp, Artificial Sequence
  NTC.3_NTC.42
  crRNA array
  misc_feature (148)..(157): n is a, c, g, or t
cttggctttatatatcttgtggaaaggacgaaacaccgtaatttctactaagtgtagattcgacgcgagacgacgtacataatttctactaagtgtagatggtcaaatcgcggcgataactaatttctactaagtgtagatttttttnnnnnnnnnnaagcttggcgtggatccgatatcaactagatcttgagacaaatggcagtattcatccacaattttaaaagaaaaggggggattggggggtacagtgcaggggaaagaatagtagacataatagcaacagacatacaaactaaag

SEQ ID NO: 20982 - DNA, 301 bp, Artificial Sequence
  NTC.3_NTC.22
  crRNA array
  misc_feature (148)..(157): n is a, c, g, or t
cttggctttatatatcttgtggaaaggacgaaacaccgtaatttctactaagtgtagattcgacgcgagacgacgtacataatttctactaagtgtagatgcgcgtcaacgtaatgtgcctaatttctactaagtgtagatttttttnnnnnnnnnnaagcttggcgtggatccgatatcaactagatcttgagacaaatggcagtattcatccacaattttaaaagaaaaggggggattggggggtacagtgcaggggaaagaatagtagacataatagcaacagacatacaaactaaag

SEQ ID NO: 20983 - DNA, 301 bp, Artificial Sequence
  NTC.3_NTC.17
  crRNA array
  misc_feature (148)..(157): n is a, c, g, or t
cttggctttatatatcttgtggaaaggacgaaacaccgtaatttctactaagtgtagattcgacgcgagacgacgtacataatttctactaagtgtagattatcgaacgctatcgaacgttaatttctactaagtgtagatttttttnnnnnnnnnnaagcttggcgtggatccgatatcaactagatcttgagacaaatggcagtattcatccacaattttaaaagaaaaggggggattggggggtacagtgcaggggaaagaatagtagacataatagcaacagacatacaaactaaag

SEQ ID NO: 20984 - DNA, 301 bp, Artificial Sequence
  NTC.3_NTC.9
  crRNA array
  misc_feature (148)..(157): n is a, c, g, or t
cttggctttatatatcttgtggaaaggacgaaacaccgtaatttctactaagtgtagattcgacgcgagacgacgtacataatttctactaagtgtagatatcgccgtacggctatggcataatttctactaagtgtagatttttttnnnnnnnnnnaagcttggcgtggatccgatatcaactagatcttgagacaaatggcagtattcatccacaattttaaaagaaaaggggggattggggggtacagtgcaggggaaagaatagtagacataatagcaacagacatacaaactaaag

SEQ ID NO: 20985 - DNA, 301 bp, Artificial Sequence
  NTC.3_NTC.30
  crRNA array
  misc_feature (148)..(157): n is a, c, g, or t
cttggctttatatatcttgtggaaaggacgaaacaccgtaatttctactaagtgtagattcgacgcgagacgacgtacataatttctactaagtgtagatcgatcgtacgggtgtcctaataatttctactaagtgtagatttttttnnnnnnnnnnaagcttggcgtggatccgatatcaactagatcttgagacaaatggcagtattcatccacaattttaaaagaaaaggggggattggggggtacagtgcaggggaaagaatagtagacataatagcaacagacatacaaactaaag

SEQ ID NO: 20986 - DNA, 301 bp, Artificial Sequence
  NTC.3_NTC.8
  crRNA array
  misc_feature (148)..(157): n is a, c, g, or t
cttggctttatatatcttgtggaaaggacgaaacaccgtaatttctactaagtgtagattcgacgcgagacgacgtacataatttctactaagtgtagatcgaccgaggttacgctgggataatttctactaagtgtagatttttttnnnnnnnnnnaagcttggcgtggatccgatatcaactagatcttgagacaaatggcagtattcatccacaattttaaaagaaaaggggggattggggggtacagtgcaggggaaagaatagtagacataatagcaacagacatacaaactaaag

SEQ ID NO: 20987 - DNA, 301 bp, Artificial Sequence
  NTC.3_NTC.46
  crRNA array
  misc_feature (148)..(157): n is a, c, g, or t
cttggctttatatatcttgtggaaaggacgaaacaccgtaatttctactaagtgtagattcgacgcgagacgacgtacataatttctactaagtgtagatagcgggtcgtagacgcgcggtaatttctactaagtgtagatttttttnnnnnnnnnnaagcttggcgtggatccgatatcaactagatcttgagacaaatggcagtattcatccacaattttaaaagaaaaggggggattggggggtacagtgcaggggaaagaatagtagacataatagcaacagacatacaaactaaag

SEQ ID NO: 20988 - DNA, 301 bp, Artificial Sequence
  NTC.3_NTC.35
  crRNA array
  misc_feature (148)..(157): n is a, c, g, or t
cttggctttatatatcttgtggaaaggacgaaacaccgtaatttctactaagtgtagattcgacgcgagacgacgtacataatttctactaagtgtagattggcgcgtaatcgctattcgtaatttctactaagtgtagatttttttnnnnnnnnnnaagcttggcgtggatccgatatcaactagatcttgagacaaatggcagtattcatccacaattttaaaagaaaaggggggattggggggtacagtgcaggggaaagaatagtagacataatagcaacagacatacaaactaaag

SEQ ID NO: 20989 - DNA, 301 bp, Artificial Sequence
  NTC.3_NTC.10
  crRNA array
  misc_feature (148)..(157): n is a, c, g, or t
cttggctttatatatcttgtggaaaggacgaaacaccgtaatttctactaagtgtagattcgacgcgagacgacgtacataatttctactaagtgtagatcgctaagttcgcgcgggccgtaatttctactaagtgtagatttttttnnnnnnnnnnaagcttggcgtggatccgatatcaactagatcttgagacaaatggcagtattcatccacaattttaaaagaaaaggggggattggggggtacagtgcaggggaaagaatagtagacataatagcaacagacatacaaactaaag

SEQ ID NO: 20990 - DNA, 301 bp, Artificial Sequence
  NTC.3_NTC.11
  crRNA array
  misc_feature (148)..(157): n is a, c, g, or t
cttggctttatatatcttgtggaaaggacgaaacaccgtaatttctactaagtgtagattcgacgcgagacgacgtacataatttctactaagtgtagatcgttcgtcgacgaagcaatctaatttctactaagtgtagatttttttnnnnnnnnnnaagcttggcgtggatccgatatcaactagatcttgagacaaatggcagtattcatccacaattttaaaagaaaaggggggattggggggtacagtgcaggggaaagaatagtagacataatagcaacagacatacaaactaaag

SEQ ID NO: 20991 - DNA, 301 bp, Artificial Sequence
  NTC.3_NTC.14
  crRNA array
  misc_feature (148)..(157): n is a, c, g, or t
cttggctttatatatcttgtggaaaggacgaaacaccgtaatttctactaagtgtagattcgacgcgagacgacgtacataatttctactaagtgtagatccgttcgtgcgatagtgttttaatttctactaagtgtagatttttttnnnnnnnnnnaagcttggcgtggatccgatatcaactagatcttgagacaaatggcagtattcatccacaattttaaaagaaaaggggggattggggggtacagtgcaggggaaagaatagtagacataatagcaacagacatacaaactaaag

SEQ ID NO: 20992 - DNA, 301 bp, Artificial Sequence
  NTC.3_NTC.28
  crRNA array
  misc_feature (148)..(157): n is a, c, g, or t
cttggctttatatatcttgtggaaaggacgaaacaccgtaatttctactaagtgtagattcgacgcgagacgacgtacataatttctactaagtgtagataccgctaatcggcgtaaacttaatttctactaagtgtagatttttttnnnnnnnnnnaagcttggcgtggatccgatatcaactagatcttgagacaaatggcagtattcatccacaattttaaaagaaaaggggggattggggggtacagtgcaggggaaagaatagtagacataatagcaacagacatacaaactaaag

SEQ ID NO: 20993 - DNA, 301 bp, Artificial Sequence
  NTC.47_NTC.32
  crRNA array
  misc_feature (148)..(157): n is a, c, g, or t
cttggctttatatatcttgtggaaaggacgaaacaccgtaatttctactaagtgtagattctcgtatcgcgattgttaataatttctactaagtgtagatgcacgttacgcccgggtcactaatttctactaagtgtagatttttttnnnnnnnnnnaagcttggcgtggatccgatatcaactagatcttgagacaaatggcagtattcatccacaattttaaaagaaaaggggggattggggggtacagtgcaggggaaagaatagtagacataatagcaacagacatacaaactaaag

SEQ ID NO: 20994 - DNA, 301 bp, Artificial Sequence
  NTC.47_NTC.40
  crRNA array
  misc_feature (148)..(157): n is a, c, g, or t
cttggctttatatatcttgtggaaaggacgaaacaccgtaatttctactaagtgtagattctcgtatcgcgattgttaataatttctactaagtgtagatattcgcgaacccggccggaataatttctactaagtgtagatttttttnnnnnnnnnnaagcttggcgtggatccgatatcaactagatcttgagacaaatggcagtattcatccacaattttaaaagaaaaggggggattggggggtacagtgcaggggaaagaatagtagacataatagcaacagacatacaaactaaag

SEQ ID NO: 20995 - DNA, 301 bp, Artificial Sequence
  NTC.47_NTC.5
  crRNA array
  misc_feature (148)..(157): n is a, c, g, or t
cttggctttatatatcttgtggaaaggacgaaacaccgtaatttctactaagtgtagattctcgtatcgcgattgttaataatttctactaagtgtagatgcttacgcgtcgcgaatgtataatttctactaagtgtagatttttttnnnnnnnnnnaagcttggcgtggatccgatatcaactagatcttgagacaaatggcagtattcatccacaattttaaaagaaaaggggggattggggggtacagtgcaggggaaagaatagtagacataatagcaacagacatacaaactaaag

SEQ ID NO: 20996 - DNA, 301 bp, Artificial Sequence
  NTC.47_NTC.33
  crRNA array
  misc_feature (148)..(157): n is a, c, g, or t
cttggctttatatatcttgtggaaaggacgaaacaccgtaatttctactaagtgtagattctcgtatcgcgattgttaataatttctactaagtgtagattaagcgaccgacgcattcgctaatttctactaagtgtagatttttttnnnnnnnnnnaagcttggcgtggatccgatatcaactagatcttgagacaaatggcagtattcatccacaattttaaaagaaaaggggggattggggggtacagtgcaggggaaagaatagtagacataatagcaacagacatacaaactaaag

SEQ ID NO: 20997 - DNA, 301 bp, Artificial Sequence
  NTC.47_NTC.1
  crRNA array
  misc_feature (148)..(157): n is a, c, g, or t
cttggctttatatatcttgtggaaaggacgaaacaccgtaatttctactaagtgtagattctcgtatcgcgattgttaataatttctactaagtgtagatcgcgtaaccgttccggctcctaatttctactaagtgtagatttttttnnnnnnnnnnaagcttggcgtggatccgatatcaactagatcttgagacaaatggcagtattcatccacaattttaaaagaaaaggggggattggggggtacagtgcaggggaaagaatagtagacataatagcaacagacatacaaactaaag

SEQ ID NO: 20998 - DNA, 301 bp, Artificial Sequence
  NTC.47_NTC.6
  crRNA array
  misc_feature (148)..(157): n is a, c, g, or t
cttggctttatatatcttgtggaaaggacgaaacaccgtaatttctactaagtgtagattctcgtatcgcgattgttaataatttctactaagtgtagatcgaatcgcgcctacgggaattaatttctactaagtgtagatttttttnnnnnnnnnnaagcttggcgtggatccgatatcaactagatcttgagacaaatggcagtattcatccacaattttaaaagaaaaggggggattggggggtacagtgcaggggaaagaatagtagacataatagcaacagacatacaaactaaag

SEQ ID NO: 20999 - DNA, 301 bp, Artificial Sequence
  NTC.47_NTC.38
  crRNA array
  misc_feature (148)..(157): n is a, c, g, or t
cttggctttatatatcttgtggaaaggacgaaacaccgtaatttctactaagtgtagattctcgtatcgcgattgttaataatttctactaagtgtagataacggagcgcgatactaccataatttctactaagtgtagatttttttnnnnnnnnnnaagcttggcgtggatccgatatcaactagatcttgagacaaatggcagtattcatccacaattttaaaagaaaaggggggattggggggtacagtgcaggggaaagaatagtagacataatagcaacagacatacaaactaaag

SEQ ID NO: 21000 - DNA, 301 bp, Artificial Sequence
  NTC.47_NTC.41
  crRNA array
  misc_feature (148)..(157): n is a, c, g, or t
cttggctttatatatcttgtggaaaggacgaaacaccgtaatttctactaagtgtagattctcgtatcgcgattgttaataatttctactaagtgtagatttgatggcgcgacgcgttattaatttctactaagtgtagatttttttnnnnnnnnnnaagcttggcgtggatccgatatcaactagatcttgagacaaatggcagtattcatccacaattttaaaagaaaaggggggattggggggtacagtgcaggggaaagaatagtagacataatagcaacagacatacaaactaaag

SEQ ID NO: 21001 - DNA, 301 bp, Artificial Sequence
  NTC.47_NTC.18
  crRNA array
  misc_feature (148)..(157): n is a, c, g, or t
cttggctttatatatcttgtggaaaggacgaaacaccgtaatttctactaagtgtagattctcgtatcgcgattgttaataatttctactaagtgtagattccggttacgaccggcaaaataatttctactaagtgtagatttttttnnnnnnnnnnaagcttggcgtggatccgatatcaactagatcttgagacaaatggcagtattcatccacaattttaaaagaaaaggggggattggggggtacagtgcaggggaaagaatagtagacataatagcaacagacatacaaactaaag

SEQ ID NO: 21002 - DNA, 301 bp, Artificial Sequence
  NTC.47_NTC.24
  crRNA array
  misc_feature (148)..(157): n is a, c, g, or t
cttggctttatatatcttgtggaaaggacgaaacaccgtaatttctactaagtgtagattctcgtatcgcgattgttaataatttctactaagtgtagatactatcgacgttcgtcccggtaatttctactaagtgtagatttttttnnnnnnnnnnaagcttggcgtggatccgatatcaactagatcttgagacaaatggcagtattcatccacaattttaaaagaaaaggggggattggggggtacagtgcaggggaaagaatagtagacataatagcaacagacatacaaactaaag

SEQ ID NO: 21003 - DNA, 301 bp, Artificial Sequence
  NTC.47_NTC.31
  crRNA array
  misc_feature (148)..(157): n is a, c, g, or t
cttggctttatatatcttgtggaaaggacgaaacaccgtaatttctactaagtgtagattctcgtatcgcgattgttaataatttctactaagtgtagatgccgaccgcgtgattgtaggtaatttctactaagtgtagatttttttnnnnnnnnnnaagcttggcgtggatccgatatcaactagatcttgagacaaatggcagtattcatccacaattttaaaagaaaaggggggattggggggtacagtgcaggggaaagaatagtagacataatagcaacagacatacaaactaaag

SEQ ID NO: 21004 - DNA, 301 bp, Artificial Sequence
  NTC.47_NTC.51
  crRNA array
  misc_feature (148)..(157): n is a, c, g, or t
cttggctttatatatcttgtggaaaggacgaaacaccgtaatttctactaagtgtagattctcgtatcgcgattgttaataatttctactaagtgtagattaacgcgcaacacgccaatgtaatttctactaagtgtagatttttttnnnnnnnnnnaagcttggcgtggatccgatatcaactagatcttgagacaaatggcagtattcatccacaattttaaaagaaaaggggggattggggggtacagtgcaggggaaagaatagtagacataatagcaacagacatacaaactaaag

SEQ ID NO: 21005 - DNA, 301 bp, Artificial Sequence
  NTC.47_NTC.23
  crRNA array
  misc_feature (148)..(157): n is a, c, g, or t
cttggctttatatatcttgtggaaaggacgaaacaccgtaatttctactaagtgtagattctcgtatcgcgattgttaataatttctactaagtgtagatacgcgctattatcgtaggtgtaatttctactaagtgtagatttttttnnnnnnnnnnaagcttggcgtggatccgatatcaactagatcttgagacaaatggcagtattcatccacaattttaaaagaaaaggggggattggggggtacagtgcaggggaaagaatagtagacataatagcaacagacatacaaactaaag

SEQ ID NO: 21006 - DNA, 301 bp, Artificial Sequence
  NTC.47_NTC.36
  crRNA array
  misc_feature (148)..(157): n is a, c, g, or t
cttggctttatatatcttgtggaaaggacgaaacaccgtaatttctactaagtgtagattctcgtatcgcgattgttaataatttctactaagtgtagatcaacccgccgtagcgggccttaatttctactaagtgtagatttttttnnnnnnnnnnaagcttggcgtggatccgatatcaactagatcttgagacaaatggcagtattcatccacaattttaaaagaaaaggggggattggggggtacagtgcaggggaaagaatagtagacataatagcaacagacatacaaactaaag

SEQ ID NO: 21007 - DNA, 301 bp, Artificial Sequence
  NTC.47_NTC.15
  crRNA array
  misc_feature (148)..(157): n is a, c, g, or t
cttggctttatatatcttgtggaaaggacgaaacaccgtaatttctactaagtgtagattctcgtatcgcgattgttaataatttctactaagtgtagatgttgtcgtgccgcgaatttataatttctactaagtgtagatttttttnnnnnnnnnnaagcttggcgtggatccgatatcaactagatcttgagacaaatggcagtattcatccacaattttaaaagaaaaggggggattggggggtacagtgcaggggaaagaatagtagacataatagcaacagacatacaaactaaag

SEQ ID NO: 21008 - DNA, 301 bp, Artificial Sequence
  NTC.47_NTC.45
  crRNA array
  misc_feature (148)..(157): n is a, c, g, or t
cttggctttatatatcttgtggaaaggacgaaacaccgtaatttctactaagtgtagattctcgtatcgcgattgttaataatttctactaagtgtagatcggaacgcgtgatactagggtaatttctactaagtgtagatttttttnnnnnnnnnnaagcttggcgtggatccgatatcaactagatcttgagacaaatggcagtattcatccacaattttaaaagaaaaggggggattggggggtacagtgcaggggaaagaatagtagacataatagcaacagacatacaaactaaag

SEQ ID NO: 21009 - DNA, 301 bp, Artificial Sequence
  NTC.47_NTC.12
  crRNA array
  misc_feature (148)..(157): n is a, c, g, or t
cttggctttatatatcttgtggaaaggacgaaacaccgtaatttctactaagtgtagattctcgtatcgcgattgttaataatttctactaagtgtagatcgccgacgattaatcaatagtaatttctactaagtgtagatttttttnnnnnnnnnnaagcttggcgtggatccgatatcaactagatcttgagacaaatggcagtattcatccacaattttaaaagaaaaggggggattggggggtacagtgcaggggaaagaatagtagacataatagcaacagacatacaaactaaag

SEQ ID NO: 21010 - DNA, 301 bp, Artificial Sequence
  NTC.47_NTC.19
  crRNA array
  misc_feature (148)..(157): n is a, c, g, or t
cttggctttatatatcttgtggaaaggacgaaacaccgtaatttctactaagtgtagattctcgtatcgcgattgttaataatttctactaagtgtagatcgtcgtagaacgatacccgataatttctactaagtgtagatttttttnnnnnnnnnnaagcttggcgtggatccgatatcaactagatcttgagacaaatggcagtattcatccacaattttaaaagaaaaggggggattggggggtacagtgcaggggaaagaatagtagacataatagcaacagacatacaaactaaag

SEQ ID NO: 21011 - DNA, 301 bp, Artificial Sequence
  NTC.47_NTC.20
  crRNA array
  misc_feature (148)..(157): n is a, c, g, or t
cttggctttatatatcttgtggaaaggacgaaacaccgtaatttctactaagtgtagattctcgtatcgcgattgttaataatttctactaagtgtagatattccggcgcgaccagaagataatttctactaagtgtagatttttttnnnnnnnnnnaagcttggcgtggatccgatatcaactagatcttgagacaaatggcagtattcatccacaattttaaaagaaaaggggggattggggggtacagtgcaggggaaagaatagtagacataatagcaacagacatacaaactaaag

SEQ ID NO: 21012 - DNA, 301 bp, Artificial Sequence
  NTC.47_NTC.48
  crRNA array
  misc_feature (148)..(157): n is a, c, g, or t
cttggctttatatatcttgtggaaaggacgaaacaccgtaatttctactaagtgtagattctcgtatcgcgattgttaataatttctactaagtgtagatcggtcgactacggctgttagtaatttctactaagtgtagatttttttnnnnnnnnnnaagcttggcgtggatccgatatcaactagatcttgagacaaatggcagtattcatccacaattttaaaagaaaaggggggattggggggtacagtgcaggggaaagaatagtagacataatagcaacagacatacaaactaaag

SEQ ID NO: 21013 - DNA, 301 bp, Artificial Sequence
  NTC.47_NTC.26
  crRNA array
  misc_feature (148)..(157): n is a, c, g, or t
cttggctttatatatcttgtggaaaggacgaaacaccgtaatttctactaagtgtagattctcgtatcgcgattgttaataatttctactaagtgtagatcgcgacggcggttttaacactaatttctactaagtgtagatttttttnnnnnnnnnnaagcttggcgtggatccgatatcaactagatcttgagacaaatggcagtattcatccacaattttaaaagaaaaggggggattggggggtacagtgcaggggaaagaatagtagacataatagcaacagacatacaaactaaag

SEQ ID NO: 21014 - DNA, 301 bp, Artificial Sequence
  NTC.47_NTC.27
  crRNA array
  misc_feature (148)..(157): n is a, c, g, or t
cttggctttatatatcttgtggaaaggacgaaacaccgtaatttctactaagtgtagattctcgtatcgcgattgttaataatttctactaagtgtagatgtcgcgttgcgaccggcgcttaatttctactaagtgtagatttttttnnnnnnnnnnaagcttggcgtggatccgatatcaactagatcttgagacaaatggcagtattcatccacaattttaaaagaaaaggggggattggggggtacagtgcaggggaaagaatagtagacataatagcaacagacatacaaactaaag

SEQ ID NO: 21015 - DNA, 301 bp, Artificial Sequence
  NTC.47_NTC.34
  crRNA array
  misc_feature (148)..(157): n is a, c, g, or t
cttggctttatatatcttgtggaaaggacgaaacaccgtaatttctactaagtgtagattctcgtatcgcgattgttaataatttctactaagtgtagattagcgttcgacacgtgaaactaatttctactaagtgtagatttttttnnnnnnnnnnaagcttggcgtggatccgatatcaactagatcttgagacaaatggcagtattcatccacaattttaaaagaaaaggggggattggggggtacagtgcaggggaaagaatagtagacataatagcaacagacatacaaactaaag

SEQ ID NO: 21016 - DNA, 301 bp, Artificial Sequence
  NTC.47_NTC.16
  crRNA array
  misc_feature (148)..(157): n is a, c, g, or t
cttggctttatatatcttgtggaaaggacgaaacaccgtaatttctactaagtgtagattctcgtatcgcgattgttaataatttctactaagtgtagatcggtacgttagacgaaaatttaatttctactaagtgtagatttttttnnnnnnnnnnaagcttggcgtggatccgatatcaactagatcttgagacaaatggcagtattcatccacaattttaaaagaaaaggggggattggggggtacagtgcaggggaaagaatagtagacataatagcaacagacatacaaactaaag

SEQ ID NO: 21017 - DNA, 301 bp, Artificial Sequence
  NTC.47_NTC.4
  crRNA array
  misc_feature (148)..(157): n is a, c, g, or t
cttggctttatatatcttgtggaaaggacgaaacaccgtaatttctactaagtgtagattctcgtatcgcgattgttaataatttctactaagtgtagatatacccgtcgcgaacgtgagtaatttctactaagtgtagatttttttnnnnnnnnnnaagcttggcgtggatccgatatcaactagatcttgagacaaatggcagtattcatccacaattttaaaagaaaaggggggattggggggtacagtgcaggggaaagaatagtagacataatagcaacagacatacaaactaaag

SEQ ID NO: 21018 - DNA, 301 bp, Artificial Sequence
  NTC.47_NTC.42
  crRNA array
  misc_feature (148)..(157): n is a, c, g, or t
cttggctttatatatcttgtggaaaggacgaaacaccgtaatttctactaagtgtagattctcgtatcgcgattgttaataatttctactaagtgtagatggtcaaatcgcggcgataactaatttctactaagtgtagatttttttnnnnnnnnnnaagcttggcgtggatccgatatcaactagatcttgagacaaatggcagtattcatccacaattttaaaagaaaaggggggattggggggtacagtgcaggggaaagaatagtagacataatagcaacagacatacaaactaaag

SEQ ID NO: 21019 - DNA, 301 bp, Artificial Sequence
  NTC.47_NTC.22
  crRNA array
  misc_feature (148)..(157): n is a, c, g, or t
cttggctttatatatcttgtggaaaggacgaaacaccgtaatttctactaagtgtagattctcgtatcgcgattgttaataatttctactaagtgtagatgcgcgtcaacgtaatgtgcctaatttctactaagtgtagatttttttnnnnnnnnnnaagcttggcgtggatccgatatcaactagatcttgagacaaatggcagtattcatccacaattttaaaagaaaaggggggattggggggtacagtgcaggggaaagaatagtagacataatagcaacagacatacaaactaaag

SEQ ID NO: 21020 - DNA, 301 bp, Artificial Sequence
  NTC.47_NTC.17
  crRNA array
  misc_feature (148)..(157): n is a, c, g, or t
cttggctttatatatcttgtggaaaggacgaaacaccgtaatttctactaagtgtagattctcgtatcgcgattgttaataatttctactaagtgtagattatcgaacgctatcgaacgttaatttctactaagtgtagatttttttnnnnnnnnnnaagcttggcgtggatccgatatcaactagatcttgagacaaatggcagtattcatccacaattttaaaagaaaaggggggattggggggtacagtgcaggggaaagaatagtagacataatagcaacagacatacaaactaaag

SEQ ID NO: 21021 - DNA, 301 bp, Artificial Sequence
  NTC.47_NTC.9
  crRNA array
  misc_feature (148)..(157): n is a, c, g, or t
cttggctttatatatcttgtggaaaggacgaaacaccgtaatttctactaagtgtagattctcgtatcgcgattgttaataatttctactaagtgtagatatcgccgtacggctatggcataatttctactaagtgtagatttttttnnnnnnnnnnaagcttggcgtggatccgatatcaactagatcttgagacaaatggcagtattcatccacaattttaaaagaaaaggggggattggggggtacagtgcaggggaaagaatagtagacataatagcaacagacatacaaactaaag

SEQ ID NO: 21022 - DNA, 301 bp, Artificial Sequence
  NTC.47_NTC.30
  crRNA array
  misc_feature (148)..(157): n is a, c, g, or t
cttggctttatatatcttgtggaaaggacgaaacaccgtaatttctactaagtgtagattctcgtatcgcgattgttaataatttctactaagtgtagatcgatcgtacgggtgtcctaataatttctactaagtgtagatttttttnnnnnnnnnnaagcttggcgtggatccgatatcaactagatcttgagacaaatggcagtattcatccacaattttaaaagaaaaggggggattggggggtacagtgcaggggaaagaatagtagacataatagcaacagacatacaaactaaag

SEQ ID NO: 21023 - DNA, 301 bp, Artificial Sequence
  NTC.47_NTC.8
  crRNA array
  misc_feature (148)..(157): n is a, c, g, or t
cttggctttatatatcttgtggaaaggacgaaacaccgtaatttctactaagtgtagattctcgtatcgcgattgttaataatttctactaagtgtagatcgaccgaggttacgctgggataatttctactaagtgtagatttttttnnnnnnnnnnaagcttggcgtggatccgatatcaactagatcttgagacaaatggcagtattcatccacaattttaaaagaaaaggggggattggggggtacagtgcaggggaaagaatagtagacataatagcaacagacatacaaactaaag

SEQ ID NO: 21024 - DNA, 301 bp, Artificial Sequence
  NTC.47_NTC.46
  crRNA array
  misc_feature (148)..(157): n is a, c, g, or t
cttggctttatatatcttgtggaaaggacgaaacaccgtaatttctactaagtgtagattctcgtatcgcgattgttaataatttctactaagtgtagatagcgggtcgtagacgcgcggtaatttctactaagtgtagatttttttnnnnnnnnnnaagcttggcgtggatccgatatcaactagatcttgagacaaatggcagtattcatccacaattttaaaagaaaaggggggattggggggtacagtgcaggggaaagaatagtagacataatagcaacagacatacaaactaaag

SEQ ID NO: 21025 - DNA, 301 bp, Artificial Sequence
  NTC.47_NTC.35
  crRNA array
  misc_feature (148)..(157): n is a, c, g, or t
cttggctttatatatcttgtggaaaggacgaaacaccgtaatttctactaagtgtagattctcgtatcgcgattgttaataatttctactaagtgtagattggcgcgtaatcgctattcgtaatttctactaagtgtagatttttttnnnnnnnnnnaagcttggcgtggatccgatatcaactagatcttgagacaaatggcagtattcatccacaattttaaaagaaaaggggggattggggggtacagtgcaggggaaagaatagtagacataatagcaacagacatacaaactaaag

SEQ ID NO: 21026 - DNA, 301 bp, Artificial Sequence
  NTC.47_NTC.10
  crRNA array
  misc_feature (148)..(157): n is a, c, g, or t
cttggctttatatatcttgtggaaaggacgaaacaccgtaatttctactaagtgtagattctcgtatcgcgattgttaataatttctactaagtgtagatcgctaagttcgcgcgggccgtaatttctactaagtgtagatttttttnnnnnnnnnnaagcttggcgtggatccgatatcaactagatcttgagacaaatggcagtattcatccacaattttaaaagaaaaggggggattggggggtacagtgcaggggaaagaatagtagacataatagcaacagacatacaaactaaag

SEQ ID NO: 21027 - DNA, 301 bp, Artificial Sequence
  NTC.47_NTC.11
  crRNA array
  misc_feature (148)..(157): n is a, c, g, or t
cttggctttatatatcttgtggaaaggacgaaacaccgtaatttctactaagtgtagattctcgtatcgcgattgttaataatttctactaagtgtagatcgttcgtcgacgaagcaatctaatttctactaagtgtagatttttttnnnnnnnnnnaagcttggcgtggatccgatatcaactagatcttgagacaaatggcagtattcatccacaattttaaaagaaaaggggggattggggggtacagtgcaggggaaagaatagtagacataatagcaacagacatacaaactaaag

SEQ ID NO: 21028 - DNA, 301 bp, Artificial Sequence
  NTC.47_NTC.14
  crRNA array
  misc_feature (148)..(157): n is a, c, g, or t
cttggctttatatatcttgtggaaaggacgaaacaccgtaatttctactaagtgtagattctcgtatcgcgattgttaataatttctactaagtgtagatccgttcgtgcgatagtgttttaatttctactaagtgtagatttttttnnnnnnnnnnaagcttggcgtggatccgatatcaactagatcttgagacaaatggcagtattcatccacaattttaaaagaaaaggggggattggggggtacagtgcaggggaaagaatagtagacataatagcaacagacatacaaactaaag

SEQ ID NO: 21029 - DNA, 301 bp, Artificial Sequence
  NTC.47_NTC.28
  crRNA array
  misc_feature (148)..(157): n is a, c, g, or t
cttggctttatatatcttgtggaaaggacgaaacaccgtaatttctactaagtgtagattctcgtatcgcgattgttaataatttctactaagtgtagataccgctaatcggcgtaaacttaatttctactaagtgtagatttttttnnnnnnnnnnaagcttggcgtggatccgatatcaactagatcttgagacaaatggcagtattcatccacaattttaaaagaaaaggggggattggggggtacagtgcaggggaaagaatagtagacataatagcaacagacatacaaactaaag

SEQ ID NO: 21030 - DNA, 301 bp, Artificial Sequence
  NTC.32_NTC.40
  crRNA array
  misc_feature (148)..(157): n is a, c, g, or t
cttggctttatatatcttgtggaaaggacgaaacaccgtaatttctactaagtgtagatgcacgttacgcccgggtcactaatttctactaagtgtagatattcgcgaacccggccggaataatttctactaagtgtagatttttttnnnnnnnnnnaagcttggcgtggatccgatatcaactagatcttgagacaaatggcagtattcatccacaattttaaaagaaaaggggggattggggggtacagtgcaggggaaagaatagtagacataatagcaacagacatacaaactaaag

SEQ ID NO: 21031 - DNA, 301 bp, Artificial Sequence
  NTC.32_NTC.5
  crRNA array
  misc_feature (148)..(157): n is a, c, g, or t
cttggctttatatatcttgtggaaaggacgaaacaccgtaatttctactaagtgtagatgcacgttacgcccgggtcactaatttctactaagtgtagatgcttacgcgtcgcgaatgtataatttctactaagtgtagatttttttnnnnnnnnnnaagcttggcgtggatccgatatcaactagatcttgagacaaatggcagtattcatccacaattttaaaagaaaaggggggattggggggtacagtgcaggggaaagaatagtagacataatagcaacagacatacaaactaaag

SEQ ID NO: 21032 - DNA, 301 bp, Artificial Sequence
  NTC.32_NTC.33
  crRNA array
  misc_feature (148)..(157): n is a, c, g, or t
cttggctttatatatcttgtggaaaggacgaaacaccgtaatttctactaagtgtagatgcacgttacgcccgggtcactaatttctactaagtgtagattaagcgaccgacgcattcgctaatttctactaagtgtagatttttttnnnnnnnnnnaagcttggcgtggatccgatatcaactagatcttgagacaaatggcagtattcatccacaattttaaaagaaaaggggggattggggggtacagtgcaggggaaagaatagtagacataatagcaacagacatacaaactaaag

SEQ ID NO: 21033 - DNA, 301 bp, Artificial Sequence
  NTC.32_NTC.1
  crRNA array
  misc_feature (148)..(157): n is a, c, g, or t
cttggctttatatatcttgtggaaaggacgaaacaccgtaatttctactaagtgtagatgcacgttacgcccgggtcactaatttctactaagtgtagatcgcgtaaccgttccggctcctaatttctactaagtgtagatttttttnnnnnnnnnnaagcttggcgtggatccgatatcaactagatcttgagacaaatggcagtattcatccacaattttaaaagaaaaggggggattggggggtacagtgcaggggaaagaatagtagacataatagcaacagacatacaaactaaag

SEQ ID NO: 21034 - DNA, 301 bp, Artificial Sequence
  NTC.32_NTC.6
  crRNA array
  misc_feature (148)..(157): n is a, c, g, or t
cttggctttatatatcttgtggaaaggacgaaacaccgtaatttctactaagtgtagatgcacgttacgcccgggtcactaatttctactaagtgtagatcgaatcgcgcctacgggaattaatttctactaagtgtagatttttttnnnnnnnnnnaagcttggcgtggatccgatatcaactagatcttgagacaaatggcagtattcatccacaattttaaaagaaaaggggggattggggggtacagtgcaggggaaagaatagtagacataatagcaacagacatacaaactaaag

SEQ ID NO: 21035 - DNA, 301 bp, Artificial Sequence
  NTC.32_NTC.38
  crRNA array
  misc_feature (148)..(157): n is a, c, g, or t
cttggctttatatatcttgtggaaaggacgaaacaccgtaatttctactaagtgtagatgcacgttacgcccgggtcactaatttctactaagtgtagataacggagcgcgatactaccataatttctactaagtgtagatttttttnnnnnnnnnnaagcttggcgtggatccgatatcaactagatcttgagacaaatggcagtattcatccacaattttaaaagaaaaggggggattggggggtacagtgcaggggaaagaatagtagacataatagcaacagacatacaaactaaag

SEQ ID NO: 21036 - DNA, 301 bp, Artificial Sequence
  NTC.32_NTC.41
  crRNA array
  misc_feature (148)..(157): n is a, c, g, or t
cttggctttatatatcttgtggaaaggacgaaacaccgtaatttctactaagtgtagatgcacgttacgcccgggtcactaatttctactaagtgtagatttgatggcgcgacgcgttattaatttctactaagtgtagatttttttnnnnnnnnnnaagcttggcgtggatccgatatcaactagatcttgagacaaatggcagtattcatccacaattttaaaagaaaaggggggattggggggtacagtgcaggggaaagaatagtagacataatagcaacagacatacaaactaaag

SEQ ID NO: 21037 - DNA, 301 bp, Artificial Sequence
  NTC.32_NTC.18
  crRNA array
  misc_feature (148)..(157): n is a, c, g, or t
cttggctttatatatcttgtggaaaggacgaaacaccgtaatttctactaagtgtagatgcacgttacgcccgggtcactaatttctactaagtgtagattccggttacgaccggcaaaataatttctactaagtgtagatttttttnnnnnnnnnnaagcttggcgtggatccgatatcaactagatcttgagacaaatggcagtattcatccacaattttaaaagaaaaggggggattggggggtacagtgcaggggaaagaatagtagacataatagcaacagacatacaaactaaag

SEQ ID NO: 21038 - DNA, 301 bp, Artificial Sequence
  NTC.32_NTC.24
  crRNA array
  misc_feature (148)..(157): n is a, c, g, or t
cttggctttatatatcttgtggaaaggacgaaacaccgtaatttctactaagtgtagatgcacgttacgcccgggtcactaatttctactaagtgtagatactatcgacgttcgtcccggtaatttctactaagtgtagatttttttnnnnnnnnnnaagcttggcgtggatccgatatcaactagatcttgagacaaatggcagtattcatccacaattttaaaagaaaaggggggattggggggtacagtgcaggggaaagaatagtagacataatagcaacagacatacaaactaaag

SEQ ID NO: 21039 - DNA, 301 bp, Artificial Sequence
  NTC.32_NTC.31
  crRNA array
  misc_feature (148)..(157): n is a, c, g, or t
cttggctttatatatcttgtggaaaggacgaaacaccgtaatttctactaagtgtagatgcacgttacgcccgggtcactaatttctactaagtgtagatgccgaccgcgtgattgtaggtaatttctactaagtgtagatttttttnnnnnnnnnnaagcttggcgtggatccgatatcaactagatcttgagacaaatggcagtattcatccacaattttaaaagaaaaggggggattggggggtacagtgcaggggaaagaatagtagacataatagcaacagacatacaaactaaag

SEQ ID NO: 21040 - DNA, 301 bp, Artificial Sequence
  NTC.32_NTC.51
  crRNA array
  misc_feature (148)..(157): n is a, c, g, or t
cttggctttatatatcttgtggaaaggacgaaacaccgtaatttctactaagtgtagatgcacgttacgcccgggtcactaatttctactaagtgtagattaacgcgcaacacgccaatgtaatttctactaagtgtagatttttttnnnnnnnnnnaagcttggcgtggatccgatatcaactagatcttgagacaaatggcagtattcatccacaattttaaaagaaaaggggggattggggggtacagtgcaggggaaagaatagtagacataatagcaacagacatacaaactaaag

SEQ ID NO: 21041 - DNA, 301 bp, Artificial Sequence
  NTC.32_NTC.23
  crRNA array
  misc_feature (148)..(157): n is a, c, g, or t
cttggctttatatatcttgtggaaaggacgaaacaccgtaatttctactaagtgtagatgcacgttacgcccgggtcactaatttctactaagtgtagatacgcgctattatcgtaggtgtaatttctactaagtgtagatttttttnnnnnnnnnnaagcttggcgtggatccgatatcaactagatcttgagacaaatggcagtattcatccacaattttaaaagaaaaggggggattggggggtacagtgcaggggaaagaatagtagacataatagcaacagacatacaaactaaag

SEQ ID NO: 21042 - DNA, 301 bp, Artificial Sequence
  NTC.32_NTC.36
  crRNA array
  misc_feature (148)..(157): n is a, c, g, or t
cttggctttatatatcttgtggaaaggacgaaacaccgtaatttctactaagtgtagatgcacgttacgcccgggtcactaatttctactaagtgtagatcaacccgccgtagcgggccttaatttctactaagtgtagatttttttnnnnnnnnnnaagcttggcgtggatccgatatcaactagatcttgagacaaatggcagtattcatccacaattttaaaagaaaaggggggattggggggtacagtgcaggggaaagaatagtagacataatagcaacagacatacaaactaaag

SEQ ID NO: 21043 - DNA, 301 bp, Artificial Sequence
  NTC.32_NTC.15
  crRNA array
  misc_feature (148)..(157): n is a, c, g, or t
cttggctttatatatcttgtggaaaggacgaaacaccgtaatttctactaagtgtagatgcacgttacgcccgggtcactaatttctactaagtgtagatgttgtcgtgccgcgaatttataatttctactaagtgtagatttttttnnnnnnnnnnaagcttggcgtggatccgatatcaactagatcttgagacaaatggcagtattcatccacaattttaaaagaaaaggggggattggggggtacagtgcaggggaaagaatagtagacataatagcaacagacatacaaactaaag

SEQ ID NO: 21044 - DNA, 301 bp, Artificial Sequence
  NTC.32_NTC.45
  crRNA array
  misc_feature (148)..(157): n is a, c, g, or t
cttggctttatatatcttgtggaaaggacgaaacaccgtaatttctactaagtgtagatgcacgttacgcccgggtcactaatttctactaagtgtagatcggaacgcgtgatactagggtaatttctactaagtgtagatttttttnnnnnnnnnnaagcttggcgtggatccgatatcaactagatcttgagacaaatggcagtattcatccacaattttaaaagaaaaggggggattggggggtacagtgcaggggaaagaatagtagacataatagcaacagacatacaaactaaag

SEQ ID NO: 21045 - DNA, 301 bp, Artificial Sequence
  NTC.32_NTC.12
  crRNA array
  misc_feature (148)..(157): n is a, c, g, or t
cttggctttatatatcttgtggaaaggacgaaacaccgtaatttctactaagtgtagatgcacgttacgcccgggtcactaatttctactaagtgtagatcgccgacgattaatcaatagtaatttctactaagtgtagatttttttnnnnnnnnnnaagcttggcgtggatccgatatcaactagatcttgagacaaatggcagtattcatccacaattttaaaagaaaaggggggattggggggtacagtgcaggggaaagaatagtagacataatagcaacagacatacaaactaaag

SEQ ID NO: 21046 - DNA, 301 bp, Artificial Sequence
  NTC.32_NTC.19
  crRNA array
  misc_feature (148)..(157): n is a, c, g, or t
cttggctttatatatcttgtggaaaggacgaaacaccgtaatttctactaagtgtagatgcacgttacgcccgggtcactaatttctactaagtgtagatcgtcgtagaacgatacccgataatttctactaagtgtagatttttttnnnnnnnnnnaagcttggcgtggatccgatatcaactagatcttgagacaaatggcagtattcatccacaattttaaaagaaaaggggggattggggggtacagtgcaggggaaagaatagtagacataatagcaacagacatacaaactaaag

SEQ ID NO: 21047 - DNA, 301 bp, Artificial Sequence
  NTC.32_NTC.20
  crRNA array
  misc_feature (148)..(157): n is a, c, g, or t
cttggctttatatatcttgtggaaaggacgaaacaccgtaatttctactaagtgtagatgcacgttacgcccgggtcactaatttctactaagtgtagatattccggcgcgaccagaagataatttctactaagtgtagatttttttnnnnnnnnnnaagcttggcgtggatccgatatcaactagatcttgagacaaatggcagtattcatccacaattttaaaagaaaaggggggattggggggtacagtgcaggggaaagaatagtagacataatagcaacagacatacaaactaaag

SEQ ID NO: 21048 - DNA, 301 bp, Artificial Sequence
  NTC.32_NTC.48
  crRNA array
  misc_feature (148)..(157): n is a, c, g, or t
cttggctttatatatcttgtggaaaggacgaaacaccgtaatttctactaagtgtagatgcacgttacgcccgggtcactaatttctactaagtgtagatcggtcgactacggctgttagtaatttctactaagtgtagatttttttnnnnnnnnnnaagcttggcgtggatccgatatcaactagatcttgagacaaatggcagtattcatccacaattttaaaagaaaaggggggattggggggtacagtgcaggggaaagaatagtagacataatagcaacagacatacaaactaaag

SEQ ID NO: 21049 - DNA, 301 bp, Artificial Sequence
  NTC.32_NTC.26
  crRNA array
  misc_feature (148)..(157): n is a, c, g, or t
cttggctttatatatcttgtggaaaggacgaaacaccgtaatttctactaagtgtagatgcacgttacgcccgggtcactaatttctactaagtgtagatcgcgacggcggttttaacactaatttctactaagtgtagatttttttnnnnnnnnnnaagcttggcgtggatccgatatcaactagatcttgagacaaatggcagtattcatccacaattttaaaagaaaaggggggattggggggtacagtgcaggggaaagaatagtagacataatagcaacagacatacaaactaaag

SEQ ID NO: 21050 - DNA, 301 bp, Artificial Sequence
  NTC.32_NTC.27
  crRNA array
  misc_feature (148)..(157): n is a, c, g, or t
cttggctttatatatcttgtggaaaggacgaaacaccgtaatttctactaagtgtagatgcacgttacgcccgggtcactaatttctactaagtgtagatgtcgcgttgcgaccggcgcttaatttctactaagtgtagatttttttnnnnnnnnnnaagcttggcgtggatccgatatcaactagatcttgagacaaatggcagtattcatccacaattttaaaagaaaaggggggattggggggtacagtgcaggggaaagaatagtagacataatagcaacagacatacaaactaaag

SEQ ID NO: 21051 - DNA, 301 bp, Artificial Sequence
  NTC.32_NTC.34
  crRNA array
  misc_feature (148)..(157): n is a, c, g, or t
cttggctttatatatcttgtggaaaggacgaaacaccgtaatttctactaagtgtagatgcacgttacgcccgggtcactaatttctactaagtgtagattagcgttcgacacgtgaaactaatttctactaagtgtagatttttttnnnnnnnnnnaagcttggcgtggatccgatatcaactagatcttgagacaaatggcagtattcatccacaattttaaaagaaaaggggggattggggggtacagtgcaggggaaagaatagtagacataatagcaacagacatacaaactaaag

SEQ ID NO: 21052 - DNA, 301 bp, Artificial Sequence
  NTC.32_NTC.16
  crRNA array
  misc_feature (148)..(157): n is a, c, g, or t
cttggctttatatatcttgtggaaaggacgaaacaccgtaatttctactaagtgtagatgcacgttacgcccgggtcactaatttctactaagtgtagatcggtacgttagacgaaaatttaatttctactaagtgtagatttttttnnnnnnnnnnaagcttggcgtggatccgatatcaactagatcttgagacaaatggcagtattcatccacaattttaaaagaaaaggggggattggggggtacagtgcaggggaaagaatagtagacataatagcaacagacatacaaactaaag

SEQ ID NO: 21053 - DNA, 301 bp, Artificial Sequence
  NTC.32_NTC.4
  crRNA array
  misc_feature (148)..(157): n is a, c, g, or t
cttggctttatatatcttgtggaaaggacgaaacaccgtaatttctactaagtgtagatgcacgttacgcccgggtcactaatttctactaagtgtagatatacccgtcgcgaacgtgagtaatttctactaagtgtagatttttttnnnnnnnnnnaagcttggcgtggatccgatatcaactagatcttgagacaaatggcagtattcatccacaattttaaaagaaaaggggggattggggggtacagtgcaggggaaagaatagtagacataatagcaacagacatacaaactaaag

SEQ ID NO: 21054 - DNA, 301 bp, Artificial Sequence
  NTC.32_NTC.42
  crRNA array
  misc_feature (148)..(157): n is a, c, g, or t
cttggctttatatatcttgtggaaaggacgaaacaccgtaatttctactaagtgtagatgcacgttacgcccgggtcactaatttctactaagtgtagatggtcaaatcgcggcgataactaatttctactaagtgtagatttttttnnnnnnnnnnaagcttggcgtggatccgatatcaactagatcttgagacaaatggcagtattcatccacaattttaaaagaaaaggggggattggggggtacagtgcaggggaaagaatagtagacataatagcaacagacatacaaactaaag

SEQ ID NO: 21055 - DNA, 301 bp, Artificial Sequence
  NTC.32_NTC.22
  crRNA array
  misc_feature (148)..(157): n is a, c, g, or t
cttggctttatatatcttgtggaaaggacgaaacaccgtaatttctactaagtgtagatgcacgttacgcccgggtcactaatttctactaagtgtagatgcgcgtcaacgtaatgtgcctaatttctactaagtgtagatttttttnnnnnnnnnnaagcttggcgtggatccgatatcaactagatcttgagacaaatggcagtattcatccacaattttaaaagaaaaggggggattggggggtacagtgcaggggaaagaatagtagacataatagcaacagacatacaaactaaag

SEQ ID NO: 21056 - DNA, 301 bp, Artificial Sequence
  NTC.32_NTC.17
  crRNA array
  misc_feature (148)..(157): n is a, c, g, or t
cttggctttatatatcttgtggaaaggacgaaacaccgtaatttctactaagtgtagatgcacgttacgcccgggtcactaatttctactaagtgtagattatcgaacgctatcgaacgttaatttctactaagtgtagatttttttnnnnnnnnnnaagcttggcgtggatccgatatcaactagatcttgagacaaatggcagtattcatccacaattttaaaagaaaaggggggattggggggtacagtgcaggggaaagaatagtagacataatagcaacagacatacaaactaaag

SEQ ID NO: 21057 - DNA, 301 bp, Artificial Sequence
  NTC.32_NTC.9
  crRNA array
  misc_feature (148)..(157): n is a, c, g, or t
cttggctttatatatcttgtggaaaggacgaaacaccgtaatttctactaagtgtagatgcacgttacgcccgggtcactaatttctactaagtgtagatatcgccgtacggctatggcataatttctactaagtgtagatttttttnnnnnnnnnnaagcttggcgtggatccgatatcaactagatcttgagacaaatggcagtattcatccacaattttaaaagaaaaggggggattggggggtacagtgcaggggaaagaatagtagacataatagcaacagacatacaaactaaag

SEQ ID NO: 21058 - DNA, 301 bp, Artificial Sequence
  NTC.32_NTC.30
  crRNA array
  misc_feature (148)..(157): n is a, c, g, or t
cttggctttatatatcttgtggaaaggacgaaacaccgtaatttctactaagtgtagatgcacgttacgcccgggtcactaatttctactaagtgtagatcgatcgtacgggtgtcctaataatttctactaagtgtagatttttttnnnnnnnnnnaagcttggcgtggatccgatatcaactagatcttgagacaaatggcagtattcatccacaattttaaaagaaaaggggggattggggggtacagtgcaggggaaagaatagtagacataatagcaacagacatacaaactaaag

SEQ ID NO: 21059 - DNA, 301 bp, Artificial Sequence
  NTC.32_NTC.8
  crRNA array
  misc_feature (148)..(157): n is a, c, g, or t
cttggctttatatatcttgtggaaaggacgaaacaccgtaatttctactaagtgtagatgcacgttacgcccgggtcactaatttctactaagtgtagatcgaccgaggttacgctgggataatttctactaagtgtagatttttttnnnnnnnnnnaagcttggcgtggatccgatatcaactagatcttgagacaaatggcagtattcatccacaattttaaaagaaaaggggggattggggggtacagtgcaggggaaagaatagtagacataatagcaacagacatacaaactaaag

SEQ ID NO: 21060 - DNA, 301 bp, Artificial Sequence
  NTC.32_NTC.46
  crRNA array
  misc_feature (148)..(157): n is a, c, g, or t
cttggctttatatatcttgtggaaaggacgaaacaccgtaatttctactaagtgtagatgcacgttacgcccgggtcactaatttctactaagtgtagatagcgggtcgtagacgcgcggtaatttctactaagtgtagatttttttnnnnnnnnnnaagcttggcgtggatccgatatcaactagatcttgagacaaatggcagtattcatccacaattttaaaagaaaaggggggattggggggtacagtgcaggggaaagaatagtagacataatagcaacagacatacaaactaaag

SEQ ID NO: 21061 - DNA, 301 bp, Artificial Sequence
  NTC.32_NTC.35
  crRNA array
  misc_feature (148)..(157): n is a, c, g, or t
cttggctttatatatcttgtggaaaggacgaaacaccgtaatttctactaagtgtagatgcacgttacgcccgggtcactaatttctactaagtgtagattggcgcgtaatcgctattcgtaatttctactaagtgtagatttttttnnnnnnnnnnaagcttggcgtggatccgatatcaactagatcttgagacaaatggcagtattcatccacaattttaaaagaaaaggggggattggggggtacagtgcaggggaaagaatagtagacataatagcaacagacatacaaactaaag

SEQ ID NO: 21062 - DNA, 301 bp, Artificial Sequence
  NTC.32_NTC.10
  crRNA array
  misc_feature (148)..(157): n is a, c, g, or t
cttggctttatatatcttgtggaaaggacgaaacaccgtaatttctactaagtgtagatgcacgttacgcccgggtcactaatttctactaagtgtagatcgctaagttcgcgcgggccgtaatttctactaagtgtagatttttttnnnnnnnnnnaagcttggcgtggatccgatatcaactagatcttgagacaaatggcagtattcatccacaattttaaaagaaaaggggggattggggggtacagtgcaggggaaagaatagtagacataatagcaacagacatacaaactaaag

SEQ ID NO: 21063 - DNA, 301 bp, Artificial Sequence
  NTC.32_NTC.11
  crRNA array
  misc_feature (148)..(157): n is a, c, g, or t
cttggctttatatatcttgtggaaaggacgaaacaccgtaatttctactaagtgtagatgcacgttacgcccgggtcactaatttctactaagtgtagatcgttcgtcgacgaagcaatctaatttctactaagtgtagatttttttnnnnnnnnnnaagcttggcgtggatccgatatcaactagatcttgagacaaatggcagtattcatccacaattttaaaagaaaaggggggattggggggtacagtgcaggggaaagaatagtagacataatagcaacagacatacaaactaaag

SEQ ID NO: 21064 - DNA, 301 bp, Artificial Sequence
  NTC.32_NTC.14
  crRNA array
  misc_feature (148)..(157): n is a, c, g, or t
cttggctttatatatcttgtggaaaggacgaaacaccgtaatttctactaagtgtagatgcacgttacgcccgggtcactaatttctactaagtgtagatccgttcgtgcgatagtgttttaatttctactaagtgtagatttttttnnnnnnnnnnaagcttggcgtggatccgatatcaactagatcttgagacaaatggcagtattcatccacaattttaaaagaaaaggggggattggggggtacagtgcaggggaaagaatagtagacataatagcaacagacatacaaactaaag

SEQ ID NO: 21065 - DNA, 301 bp, Artificial Sequence
  NTC.32_NTC.28
  crRNA array
  misc_feature (148)..(157): n is a, c, g, or t
cttggctttatatatcttgtggaaaggacgaaacaccgtaatttctactaagtgtagatgcacgttacgcccgggtcactaatttctactaagtgtagataccgctaatcggcgtaaacttaatttctactaagtgtagatttttttnnnnnnnnnnaagcttggcgtggatccgatatcaactagatcttgagacaaatggcagtattcatccacaattttaaaagaaaaggggggattggggggtacagtgcaggggaaagaatagtagacataatagcaacagacatacaaactaaag

SEQ ID NO: 21066 - DNA, 301 bp, Artificial Sequence
  NTC.40_NTC.5
  crRNA array
  misc_feature (148)..(157): n is a, c, g, or t
cttggctttatatatcttgtggaaaggacgaaacaccgtaatttctactaagtgtagatattcgcgaacccggccggaataatttctactaagtgtagatgcttacgcgtcgcgaatgtataatttctactaagtgtagatttttttnnnnnnnnnnaagcttggcgtggatccgatatcaactagatcttgagacaaatggcagtattcatccacaattttaaaagaaaaggggggattggggggtacagtgcaggggaaagaatagtagacataatagcaacagacatacaaactaaag

SEQ ID NO: 21067 - DNA, 301 bp, Artificial Sequence
  NTC.40_NTC.33
  crRNA array
  misc_feature (148)..(157): n is a, c, g, or t
cttggctttatatatcttgtggaaaggacgaaacaccgtaatttctactaagtgtagatattcgcgaacccggccggaataatttctactaagtgtagattaagcgaccgacgcattcgctaatttctactaagtgtagatttttttnnnnnnnnnnaagcttggcgtggatccgatatcaactagatcttgagacaaatggcagtattcatccacaattttaaaagaaaaggggggattggggggtacagtgcaggggaaagaatagtagacataatagcaacagacatacaaactaaag

SEQ ID NO: 21068 - DNA, 301 bp, Artificial Sequence
  NTC.40_NTC.1
  crRNA array
  misc_feature (148)..(157): n is a, c, g, or t
cttggctttatatatcttgtggaaaggacgaaacaccgtaatttctactaagtgtagatattcgcgaacccggccggaataatttctactaagtgtagatcgcgtaaccgttccggctcctaatttctactaagtgtagatttttttnnnnnnnnnnaagcttggcgtggatccgatatcaactagatcttgagacaaatggcagtattcatccacaattttaaaagaaaaggggggattggggggtacagtgcaggggaaagaatagtagacataatagcaacagacatacaaactaaag

SEQ ID NO: 21069 - DNA, 301 bp, Artificial Sequence
  NTC.40_NTC.6
  crRNA array
  misc_feature (148)..(157): n is a, c, g, or t
cttggctttatatatcttgtggaaaggacgaaacaccgtaatttctactaagtgtagatattcgcgaacccggccggaataatttctactaagtgtagatcgaatcgcgcctacgggaattaatttctactaagtgtagatttttttnnnnnnnnnnaagcttggcgtggatccgatatcaactagatcttgagacaaatggcagtattcatccacaattttaaaagaaaaggggggattggggggtacagtgcaggggaaagaatagtagacataatagcaacagacatacaaactaaag

SEQ ID NO: 21070 - DNA, 301 bp, Artificial Sequence
  NTC.40_NTC.38
  crRNA array
  misc_feature (148)..(157): n is a, c, g, or t
cttggctttatatatcttgtggaaaggacgaaacaccgtaatttctactaagtgtagatattcgcgaacccggccggaataatttctactaagtgtagataacggagcgcgatactaccataatttctactaagtgtagatttttttnnnnnnnnnnaagcttggcgtggatccgatatcaactagatcttgagacaaatggcagtattcatccacaattttaaaagaaaaggggggattggggggtacagtgcaggggaaagaatagtagacataatagcaacagacatacaaactaaag

SEQ ID NO: 21071 - DNA, 301 bp, Artificial Sequence
  NTC.40_NTC.41
  crRNA array
  misc_feature (148)..(157): n is a, c, g, or t
cttggctttatatatcttgtggaaaggacgaaacaccgtaatttctactaagtgtagatattcgcgaacccggccggaataatttctactaagtgtagatttgatggcgcgacgcgttattaatttctactaagtgtagatttttttnnnnnnnnnnaagcttggcgtggatccgatatcaactagatcttgagacaaatggcagtattcatccacaattttaaaagaaaaggggggattggggggtacagtgcaggggaaagaatagtagacataatagcaacagacatacaaactaaag

SEQ ID NO: 21072 - DNA, 301 bp, Artificial Sequence
  NTC.40_NTC.18
  crRNA array
  misc_feature (148)..(157): n is a, c, g, or t
cttggctttatatatcttgtggaaaggacgaaacaccgtaatttctactaagtgtagatattcgcgaacccggccggaataatttctactaagtgtagattccggttacgaccggcaaaataatttctactaagtgtagatttttttnnnnnnnnnnaagcttggcgtggatccgatatcaactagatcttgagacaaatggcagtattcatccacaattttaaaagaaaaggggggattggggggtacagtgcaggggaaagaatagtagacataatagcaacagacatacaaactaaag

SEQ ID NO: 21073 - DNA, 301 bp, Artificial Sequence
  NTC.40_NTC.24
  crRNA array
  misc_feature (148)..(157): n is a, c, g, or t
cttggctttatatatcttgtggaaaggacgaaacaccgtaatttctactaagtgtagatattcgcgaacccggccggaataatttctactaagtgtagatactatcgacgttcgtcccggtaatttctactaagtgtagatttttttnnnnnnnnnnaagcttggcgtggatccgatatcaactagatcttgagacaaatggcagtattcatccacaattttaaaagaaaaggggggattggggggtacagtgcaggggaaagaatagtagacataatagcaacagacatacaaactaaag

SEQ ID NO: 21074 - DNA, 301 bp, Artificial Sequence
  NTC.40_NTC.31
  crRNA array
  misc_feature (148)..(157): n is a, c, g, or t
cttggctttatatatcttgtggaaaggacgaaacaccgtaatttctactaagtgtagatattcgcgaacccggccggaataatttctactaagtgtagatgccgaccgcgtgattgtaggtaatttctactaagtgtagatttttttnnnnnnnnnnaagcttggcgtggatccgatatcaactagatcttgagacaaatggcagtattcatccacaattttaaaagaaaaggggggattggggggtacagtgcaggggaaagaatagtagacataatagcaacagacatacaaactaaag

SEQ ID NO: 21075 - DNA, 301 bp, Artificial Sequence
  NTC.40_NTC.51
  crRNA array
  misc_feature (148)..(157): n is a, c, g, or t
cttggctttatatatcttgtggaaaggacgaaacaccgtaatttctactaagtgtagatattcgcgaacccggccggaataatttctactaagtgtagattaacgcgcaacacgccaatgtaatttctactaagtgtagatttttttnnnnnnnnnnaagcttggcgtggatccgatatcaactagatcttgagacaaatggcagtattcatccacaattttaaaagaaaaggggggattggggggtacagtgcaggggaaagaatagtagacataatagcaacagacatacaaactaaag

SEQ ID NO: 21076 - DNA, 301 bp, Artificial Sequence
  NTC.40_NTC.23
  crRNA array
  misc_feature (148)..(157): n is a, c, g, or t
cttggctttatatatcttgtggaaaggacgaaacaccgtaatttctactaagtgtagatattcgcgaacccggccggaataatttctactaagtgtagatacgcgctattatcgtaggtgtaatttctactaagtgtagatttttttnnnnnnnnnnaagcttggcgtggatccgatatcaactagatcttgagacaaatggcagtattcatccacaattttaaaagaaaaggggggattggggggtacagtgcaggggaaagaatagtagacataatagcaacagacatacaaactaaag

SEQ ID NO: 21077 - DNA, 301 bp, Artificial Sequence
  NTC.40_NTC.36
  crRNA array
  misc_feature (148)..(157): n is a, c, g, or t
cttggctttatatatcttgtggaaaggacgaaacaccgtaatttctactaagtgtagatattcgcgaacccggccggaataatttctactaagtgtagatcaacccgccgtagcgggccttaatttctactaagtgtagatttttttnnnnnnnnnnaagcttggcgtggatccgatatcaactagatcttgagacaaatggcagtattcatccacaattttaaaagaaaaggggggattggggggtacagtgcaggggaaagaatagtagacataatagcaacagacatacaaactaaag

SEQ ID NO: 21078 - DNA, 301 bp, Artificial Sequence
  NTC.40_NTC.15
  crRNA array
  misc_feature (148)..(157): n is a, c, g, or t
cttggctttatatatcttgtggaaaggacgaaacaccgtaatttctactaagtgtagatattcgcgaacccggccggaataatttctactaagtgtagatgttgtcgtgccgcgaatttataatttctactaagtgtagatttttttnnnnnnnnnnaagcttggcgtggatccgatatcaactagatcttgagacaaatggcagtattcatccacaattttaaaagaaaaggggggattggggggtacagtgcaggggaaagaatagtagacataatagcaacagacatacaaactaaag

SEQ ID NO: 21079 - DNA, 301 bp, Artificial Sequence
  NTC.40_NTC.45
  crRNA array
  misc_feature (148)..(157): n is a, c, g, or t
cttggctttatatatcttgtggaaaggacgaaacaccgtaatttctactaagtgtagatattcgcgaacccggccggaataatttctactaagtgtagatcggaacgcgtgatactagggtaatttctactaagtgtagatttttttnnnnnnnnnnaagcttggcgtggatccgatatcaactagatcttgagacaaatggcagtattcatccacaattttaaaagaaaaggggggattggggggtacagtgcaggggaaagaatagtagacataatagcaacagacatacaaactaaag

SEQ ID NO: 21080 - DNA, 301 bp, Artificial Sequence
  NTC.40_NTC.12
  crRNA array
  misc_feature (148)..(157): n is a, c, g, or t
cttggctttatatatcttgtggaaaggacgaaacaccgtaatttctactaagtgtagatattcgcgaacccggccggaataatttctactaagtgtagatcgccgacgattaatcaatagtaatttctactaagtgtagatttttttnnnnnnnnnnaagcttggcgtggatccgatatcaactagatcttgagacaaatggcagtattcatccacaattttaaaagaaaaggggggattggggggtacagtgcaggggaaagaatagtagacataatagcaacagacatacaaactaaag

SEQ ID NO: 21081 - DNA, 301 bp, Artificial Sequence
  NTC.40_NTC.19
  crRNA array
  misc_feature (148)..(157): n is a, c, g, or t
cttggctttatatatcttgtggaaaggacgaaacaccgtaatttctactaagtgtagatattcgcgaacccggccggaataatttctactaagtgtagatcgtcgtagaacgatacccgataatttctactaagtgtagatttttttnnnnnnnnnnaagcttggcgtggatccgatatcaactagatcttgagacaaatggcagtattcatccacaattttaaaagaaaaggggggattggggggtacagtgcaggggaaagaatagtagacataatagcaacagacatacaaactaaag

SEQ ID NO: 21082 - DNA, 301 bp, Artificial Sequence
  NTC.40_NTC.20
  crRNA array
  misc_feature (148)..(157): n is a, c, g, or t
cttggctttatatatcttgtggaaaggacgaaacaccgtaatttctactaagtgtagatattcgcgaacccggccggaataatttctactaagtgtagatattccggcgcgaccagaagataatttctactaagtgtagatttttttnnnnnnnnnnaagcttggcgtggatccgatatcaactagatcttgagacaaatggcagtattcatccacaattttaaaagaaaaggggggattggggggtacagtgcaggggaaagaatagtagacataatagcaacagacatacaaactaaag

SEQ ID NO: 21083 - DNA, 301 bp, Artificial Sequence
  NTC.40_NTC.48
  crRNA array
  misc_feature (148)..(157): n is a, c, g, or t
cttggctttatatatcttgtggaaaggacgaaacaccgtaatttctactaagtgtagatattcgcgaacccggccggaataatttctactaagtgtagatcggtcgactacggctgttagtaatttctactaagtgtagatttttttnnnnnnnnnnaagcttggcgtggatccgatatcaactagatcttgagacaaatggcagtattcatccacaattttaaaagaaaaggggggattggggggtacagtgcaggggaaagaatagtagacataatagcaacagacatacaaactaaag

SEQ ID NO: 21084 - DNA, 301 bp, Artificial Sequence
  NTC.40_NTC.26
  crRNA array
  misc_feature (148)..(157): n is a, c, g, or t
cttggctttatatatcttgtggaaaggacgaaacaccgtaatttctactaagtgtagatattcgcgaacccggccggaataatttctactaagtgtagatcgcgacggcggttttaacactaatttctactaagtgtagatttttttnnnnnnnnnnaagcttggcgtggatccgatatcaactagatcttgagacaaatggcagtattcatccacaattttaaaagaaaaggggggattggggggtacagtgcaggggaaagaatagtagacataatagcaacagacatacaaactaaag

SEQ ID NO: 21085 - DNA, 301 bp, Artificial Sequence
  NTC.40_NTC.27
  crRNA array
  misc_feature (148)..(157): n is a, c, g, or t
cttggctttatatatcttgtggaaaggacgaaacaccgtaatttctactaagtgtagatattcgcgaacccggccggaataatttctactaagtgtagatgtcgcgttgcgaccggcgcttaatttctactaagtgtagatttttttnnnnnnnnnnaagcttggcgtggatccgatatcaactagatcttgagacaaatggcagtattcatccacaattttaaaagaaaaggggggattggggggtacagtgcaggggaaagaatagtagacataatagcaacagacatacaaactaaag

SEQ ID NO: 21086 - DNA, 301 bp, Artificial Sequence
  NTC.40_NTC.34
  crRNA array
  misc_feature (148)..(157): n is a, c, g, or t
cttggctttatatatcttgtggaaaggacgaaacaccgtaatttctactaagtgtagatattcgcgaacccggccggaataatttctactaagtgtagattagcgttcgacacgtgaaactaatttctactaagtgtagatttttttnnnnnnnnnnaagcttggcgtggatccgatatcaactagatcttgagacaaatggcagtattcatccacaattttaaaagaaaaggggggattggggggtacagtgcaggggaaagaatagtagacataatagcaacagacatacaaactaaag

SEQ ID NO: 21087 - DNA, 301 bp, Artificial Sequence
  NTC.40_NTC.16
  crRNA array
  misc_feature (148)..(157): n is a, c, g, or t
cttggctttatatatcttgtggaaaggacgaaacaccgtaatttctactaagtgtagatattcgcgaacccggccggaataatttctactaagtgtagatcggtacgttagacgaaaatttaatttctactaagtgtagatttttttnnnnnnnnnnaagcttggcgtggatccgatatcaactagatcttgagacaaatggcagtattcatccacaattttaaaagaaaaggggggattggggggtacagtgcaggggaaagaatagtagacataatagcaacagacatacaaactaaag

SEQ ID NO: 21088 - DNA, 301 bp, Artificial Sequence
  NTC.40_NTC.4
  crRNA array
  misc_feature (148)..(157): n is a, c, g, or t
cttggctttatatatcttgtggaaaggacgaaacaccgtaatttctactaagtgtagatattcgcgaacccggccggaataatttctactaagtgtagatatacccgtcgcgaacgtgagtaatttctactaagtgtagatttttttnnnnnnnnnnaagcttggcgtggatccgatatcaactagatcttgagacaaatggcagtattcatccacaattttaaaagaaaaggggggattggggggtacagtgcaggggaaagaatagtagacataatagcaacagacatacaaactaaag

SEQ ID NO: 21089 - DNA, 301 bp, Artificial Sequence
  NTC.40_NTC.42
  crRNA array
  misc_feature (148)..(157): n is a, c, g, or t
cttggctttatatatcttgtggaaaggacgaaacaccgtaatttctactaagtgtagatattcgcgaacccggccggaataatttctactaagtgtagatggtcaaatcgcggcgataactaatttctactaagtgtagatttttttnnnnnnnnnnaagcttggcgtggatccgatatcaactagatcttgagacaaatggcagtattcatccacaattttaaaagaaaaggggggattggggggtacagtgcaggggaaagaatagtagacataatagcaacagacatacaaactaaag

SEQ ID NO: 21090 - DNA, 301 bp, Artificial Sequence
  NTC.40_NTC.22
  crRNA array
  misc_feature (148)..(157): n is a, c, g, or t
cttggctttatatatcttgtggaaaggacgaaacaccgtaatttctactaagtgtagatattcgcgaacccggccggaataatttctactaagtgtagatgcgcgtcaacgtaatgtgcctaatttctactaagtgtagatttttttnnnnnnnnnnaagcttggcgtggatccgatatcaactagatcttgagacaaatggcagtattcatccacaattttaaaagaaaaggggggattggggggtacagtgcaggggaaagaatagtagacataatagcaacagacatacaaactaaag

SEQ ID NO: 21091 - DNA, 301 bp, Artificial Sequence
  NTC.40_NTC.17
  crRNA array
  misc_feature (148)..(157): n is a, c, g, or t
cttggctttatatatcttgtggaaaggacgaaacaccgtaatttctactaagtgtagatattcgcgaacccggccggaataatttctactaagtgtagattatcgaacgctatcgaacgttaatttctactaagtgtagatttttttnnnnnnnnnnaagcttggcgtggatccgatatcaactagatcttgagacaaatggcagtattcatccacaattttaaaagaaaaggggggattggggggtacagtgcaggggaaagaatagtagacataatagcaacagacatacaaactaaag

SEQ ID NO: 21092 - DNA, 301 bp, Artificial Sequence
  NTC.40_NTC.9
  crRNA array
  misc_feature (148)..(157): n is a, c, g, or t
cttggctttatatatcttgtggaaaggacgaaacaccgtaatttctactaagtgtagatattcgcgaacccggccggaataatttctactaagtgtagatatcgccgtacggctatggcataatttctactaagtgtagatttttttnnnnnnnnnnaagcttggcgtggatccgatatcaactagatcttgagacaaatggcagtattcatccacaattttaaaagaaaaggggggattggggggtacagtgcaggggaaagaatagtagacataatagcaacagacatacaaactaaag

SEQ ID NO: 21093 - DNA, 301 bp, Artificial Sequence
  NTC.40_NTC.30
  crRNA array
  misc_feature (148)..(157): n is a, c, g, or t
cttggctttatatatcttgtggaaaggacgaaacaccgtaatttctactaagtgtagatattcgcgaacccggccggaataatttctactaagtgtagatcgatcgtacgggtgtcctaataatttctactaagtgtagatttttttnnnnnnnnnnaagcttggcgtggatccgatatcaactagatcttgagacaaatggcagtattcatccacaattttaaaagaaaaggggggattggggggtacagtgcaggggaaagaatagtagacataatagcaacagacatacaaactaaag

SEQ ID NO: 21094 - DNA, 301 bp, Artificial Sequence
  NTC.40_NTC.8
  crRNA array
  misc_feature (148)..(157): n is a, c, g, or t
cttggctttatatatcttgtggaaaggacgaaacaccgtaatttctactaagtgtagatattcgcgaacccggccggaataatttctactaagtgtagatcgaccgaggttacgctgggataatttctactaagtgtagatttttttnnnnnnnnnnaagcttggcgtggatccgatatcaactagatcttgagacaaatggcagtattcatccacaattttaaaagaaaaggggggattggggggtacagtgcaggggaaagaatagtagacataatagcaacagacatacaaactaaag

SEQ ID NO: 21095 - DNA, 301 bp, Artificial Sequence
  NTC.40_NTC.46
  crRNA array
  misc_feature (148)..(157): n is a, c, g, or t
cttggctttatatatcttgtggaaaggacgaaacaccgtaatttctactaagtgtagatattcgcgaacccggccggaataatttctactaagtgtagatagcgggtcgtagacgcgcggtaatttctactaagtgtagatttttttnnnnnnnnnnaagcttggcgtggatccgatatcaactagatcttgagacaaatggcagtattcatccacaattttaaaagaaaaggggggattggggggtacagtgcaggggaaagaatagtagacataatagcaacagacatacaaactaaag

SEQ ID NO: 21096 - DNA, 301 bp, Artificial Sequence
  NTC.40_NTC.35
  crRNA array
  misc_feature (148)..(157): n is a, c, g, or t
cttggctttatatatcttgtggaaaggacgaaacaccgtaatttctactaagtgtagatattcgcgaacccggccggaataatttctactaagtgtagattggcgcgtaatcgctattcgtaatttctactaagtgtagatttttttnnnnnnnnnnaagcttggcgtggatccgatatcaactagatcttgagacaaatggcagtattcatccacaattttaaaagaaaaggggggattggggggtacagtgcaggggaaagaatagtagacataatagcaacagacatacaaactaaag

SEQ ID NO: 21097 - DNA, 301 bp, Artificial Sequence
  NTC.40_NTC.10
  crRNA array
  misc_feature (148)..(157): n is a, c, g, or t
cttggctttatatatcttgtggaaaggacgaaacaccgtaatttctactaagtgtagatattcgcgaacccggccggaataatttctactaagtgtagatcgctaagttcgcgcgggccgtaatttctactaagtgtagatttttttnnnnnnnnnnaagcttggcgtggatccgatatcaactagatcttgagacaaatggcagtattcatccacaattttaaaagaaaaggggggattggggggtacagtgcaggggaaagaatagtagacataatagcaacagacatacaaactaaag

SEQ ID NO: 21098 - DNA, 301 bp, Artificial Sequence
  NTC.40_NTC.11
  crRNA array
  misc_feature (148)..(157): n is a, c, g, or t
cttggctttatatatcttgtggaaaggacgaaacaccgtaatttctactaagtgtagatattcgcgaacccggccggaataatttctactaagtgtagatcgttcgtcgacgaagcaatctaatttctactaagtgtagatttttttnnnnnnnnnnaagcttggcgtggatccgatatcaactagatcttgagacaaatggcagtattcatccacaattttaaaagaaaaggggggattggggggtacagtgcaggggaaagaatagtagacataatagcaacagacatacaaactaaag

SEQ ID NO: 21099 - DNA, 301 bp, Artificial Sequence
  NTC.40_NTC.14
  crRNA array
  misc_feature (148)..(157): n is a, c, g, or t
cttggctttatatatcttgtggaaaggacgaaacaccgtaatttctactaagtgtagatattcgcgaacccggccggaataatttctactaagtgtagatccgttcgtgcgatagtgttttaatttctactaagtgtagatttttttnnnnnnnnnnaagcttggcgtggatccgatatcaactagatcttgagacaaatggcagtattcatccacaattttaaaagaaaaggggggattggggggtacagtgcaggggaaagaatagtagacataatagcaacagacatacaaactaaag

SEQ ID NO: 21100 - DNA, 301 bp, Artificial Sequence
  NTC.40_NTC.28
  crRNA array
  misc_feature (148)..(157): n is a, c, g, or t
cttggctttatatatcttgtggaaaggacgaaacaccgtaatttctactaagtgtagatattcgcgaacccggccggaataatttctactaagtgtagataccgctaatcggcgtaaacttaatttctactaagtgtagatttttttnnnnnnnnnnaagcttggcgtggatccgatatcaactagatcttgagacaaatggcagtattcatccacaattttaaaagaaaaggggggattggggggtacagtgcaggggaaagaatagtagacataatagcaacagacatacaaactaaag

SEQ ID NO: 21101 - DNA, 301 bp, Artificial Sequence
  NTC.5_NTC.33
  crRNA array
  misc_feature (148)..(157): n is a, c, g, or t
cttggctttatatatcttgtggaaaggacgaaacaccgtaatttctactaagtgtagatgcttacgcgtcgcgaatgtataatttctactaagtgtagattaagcgaccgacgcattcgctaatttctactaagtgtagatttttttnnnnnnnnnnaagcttggcgtggatccgatatcaactagatcttgagacaaatggcagtattcatccacaattttaaaagaaaaggggggattggggggtacagtgcaggggaaagaatagtagacataatagcaacagacatacaaactaaag

SEQ ID NO: 21102 - DNA, 301 bp, Artificial Sequence
  NTC.5_NTC.1
  crRNA array
  misc_feature (148)..(157): n is a, c, g, or t
cttggctttatatatcttgtggaaaggacgaaacaccgtaatttctactaagtgtagatgcttacgcgtcgcgaatgtataatttctactaagtgtagatcgcgtaaccgttccggctcctaatttctactaagtgtagatttttttnnnnnnnnnnaagcttggcgtggatccgatatcaactagatcttgagacaaatggcagtattcatccacaattttaaaagaaaaggggggattggggggtacagtgcaggggaaagaatagtagacataatagcaacagacatacaaactaaag

SEQ ID NO: 21103 - DNA, 301 bp, Artificial Sequence
  NTC.5_NTC.6
  crRNA array
  misc_feature (148)..(157): n is a, c, g, or t
cttggctttatatatcttgtggaaaggacgaaacaccgtaatttctactaagtgtagatgcttacgcgtcgcgaatgtataatttctactaagtgtagatcgaatcgcgcctacgggaattaatttctactaagtgtagatttttttnnnnnnnnnnaagcttggcgtggatccgatatcaactagatcttgagacaaatggcagtattcatccacaattttaaaagaaaaggggggattggggggtacagtgcaggggaaagaatagtagacataatagcaacagacatacaaactaaag

SEQ ID NO: 21104 - DNA, 301 bp, Artificial Sequence
  NTC.5_NTC.38
  crRNA array
  misc_feature (148)..(157): n is a, c, g, or t
cttggctttatatatcttgtggaaaggacgaaacaccgtaatttctactaagtgtagatgcttacgcgtcgcgaatgtataatttctactaagtgtagataacggagcgcgatactaccataatttctactaagtgtagatttttttnnnnnnnnnnaagcttggcgtggatccgatatcaactagatcttgagacaaatggcagtattcatccacaattttaaaagaaaaggggggattggggggtacagtgcaggggaaagaatagtagacataatagcaacagacatacaaactaaag

SEQ ID NO: 21105 - DNA, 301 bp, Artificial Sequence
  NTC.5_NTC.41
  crRNA array
  misc_feature (148)..(157): n is a, c, g, or t
cttggctttatatatcttgtggaaaggacgaaacaccgtaatttctactaagtgtagatgcttacgcgtcgcgaatgtataatttctactaagtgtagatttgatggcgcgacgcgttattaatttctactaagtgtagatttttttnnnnnnnnnnaagcttggcgtggatccgatatcaactagatcttgagacaaatggcagtattcatccacaattttaaaagaaaaggggggattggggggtacagtgcaggggaaagaatagtagacataatagcaacagacatacaaactaaag

SEQ ID NO: 21106 - DNA, 301 bp, Artificial Sequence
  NTC.5_NTC.18
  crRNA array
  misc_feature (148)..(157): n is a, c, g, or t
cttggctttatatatcttgtggaaaggacgaaacaccgtaatttctactaagtgtagatgcttacgcgtcgcgaatgtataatttctactaagtgtagattccggttacgaccggcaaaataatttctactaagtgtagatttttttnnnnnnnnnnaagcttggcgtggatccgatatcaactagatcttgagacaaatggcagtattcatccacaattttaaaagaaaaggggggattggggggtacagtgcaggggaaagaatagtagacataatagcaacagacatacaaactaaag

SEQ ID NO: 21107 - DNA, 301 bp, Artificial Sequence
  NTC.5_NTC.24
  crRNA array
  misc_feature (148)..(157): n is a, c, g, or t
cttggctttatatatcttgtggaaaggacgaaacaccgtaatttctactaagtgtagatgcttacgcgtcgcgaatgtataatttctactaagtgtagatactatcgacgttcgtcccggtaatttctactaagtgtagatttttttnnnnnnnnnnaagcttggcgtggatccgatatcaactagatcttgagacaaatggcagtattcatccacaattttaaaagaaaaggggggattggggggtacagtgcaggggaaagaatagtagacataatagcaacagacatacaaactaaag

SEQ ID NO: 21108 - DNA, 301 bp, Artificial Sequence
  NTC.5_NTC.31
  crRNA array
  misc_feature (148)..(157): n is a, c, g, or t
cttggctttatatatcttgtggaaaggacgaaacaccgtaatttctactaagtgtagatgcttacgcgtcgcgaatgtataatttctactaagtgtagatgccgaccgcgtgattgtaggtaatttctactaagtgtagatttttttnnnnnnnnnnaagcttggcgtggatccgatatcaactagatcttgagacaaatggcagtattcatccacaattttaaaagaaaaggggggattggggggtacagtgcaggggaaagaatagtagacataatagcaacagacatacaaactaaag

SEQ ID NO: 21109 - DNA, 301 bp, Artificial Sequence
  NTC.5_NTC.51
  crRNA array
  misc_feature (148)..(157): n is a, c, g, or t
cttggctttatatatcttgtggaaaggacgaaacaccgtaatttctactaagtgtagatgcttacgcgtcgcgaatgtataatttctactaagtgtagattaacgcgcaacacgccaatgtaatttctactaagtgtagatttttttnnnnnnnnnnaagcttggcgtggatccgatatcaactagatcttgagacaaatggcagtattcatccacaattttaaaagaaaaggggggattggggggtacagtgcaggggaaagaatagtagacataatagcaacagacatacaaactaaag

SEQ ID NO: 21110 - DNA, 301 bp, Artificial Sequence
  NTC.5_NTC.23
  crRNA array
  misc_feature (148)..(157): n is a, c, g, or t
cttggctttatatatcttgtggaaaggacgaaacaccgtaatttctactaagtgtagatgcttacgcgtcgcgaatgtataatttctactaagtgtagatacgcgctattatcgtaggtgtaatttctactaagtgtagatttttttnnnnnnnnnnaagcttggcgtggatccgatatcaactagatcttgagacaaatggcagtattcatccacaattttaaaagaaaaggggggattggggggtacagtgcaggggaaagaatagtagacataatagcaacagacatacaaactaaag

SEQ ID NO: 21111 - DNA, 301 bp, Artificial Sequence
  NTC.5_NTC.36
  crRNA array
  misc_feature (148)..(157): n is a, c, g, or t
cttggctttatatatcttgtggaaaggacgaaacaccgtaatttctactaagtgtagatgcttacgcgtcgcgaatgtataatttctactaagtgtagatcaacccgccgtagcgggccttaatttctactaagtgtagatttttttnnnnnnnnnnaagcttggcgtggatccgatatcaactagatcttgagacaaatggcagtattcatccacaattttaaaagaaaaggggggattggggggtacagtgcaggggaaagaatagtagacataatagcaacagacatacaaactaaag

SEQ ID NO: 21112 - DNA, 301 bp, Artificial Sequence
  NTC.5_NTC.15
  crRNA array
  misc_feature (148)..(157): n is a, c, g, or t
cttggctttatatatcttgtggaaaggacgaaacaccgtaatttctactaagtgtagatgcttacgcgtcgcgaatgtataatttctactaagtgtagatgttgtcgtgccgcgaatttataatttctactaagtgtagatttttttnnnnnnnnnnaagcttggcgtggatccgatatcaactagatcttgagacaaatggcagtattcatccacaattttaaaagaaaaggggggattggggggtacagtgcaggggaaagaatagtagacataatagcaacagacatacaaactaaag

SEQ ID NO: 21113 - DNA, 301 bp, Artificial Sequence
  NTC.5_NTC.45
  crRNA array
  misc_feature (148)..(157): n is a, c, g, or t
cttggctttatatatcttgtggaaaggacgaaacaccgtaatttctactaagtgtagatgcttacgcgtcgcgaatgtataatttctactaagtgtagatcggaacgcgtgatactagggtaatttctactaagtgtagatttttttnnnnnnnnnnaagcttggcgtggatccgatatcaactagatcttgagacaaatggcagtattcatccacaattttaaaagaaaaggggggattggggggtacagtgcaggggaaagaatagtagacataatagcaacagacatacaaactaaag

SEQ ID NO: 21114 - DNA, 301 bp, Artificial Sequence
  NTC.5_NTC.12
  crRNA array
  misc_feature (148)..(157): n is a, c, g, or t
cttggctttatatatcttgtggaaaggacgaaacaccgtaatttctactaagtgtagatgcttacgcgtcgcgaatgtataatttctactaagtgtagatcgccgacgattaatcaatagtaatttctactaagtgtagatttttttnnnnnnnnnnaagcttggcgtggatccgatatcaactagatcttgagacaaatggcagtattcatccacaattttaaaagaaaaggggggattggggggtacagtgcaggggaaagaatagtagacataatagcaacagacatacaaactaaag

SEQ ID NO: 21115 - DNA, 301 bp, Artificial Sequence
  NTC.5_NTC.19
  crRNA array
  misc_feature (148)..(157): n is a, c, g, or t
cttggctttatatatcttgtggaaaggacgaaacaccgtaatttctactaagtgtagatgcttacgcgtcgcgaatgtataatttctactaagtgtagatcgtcgtagaacgatacccgataatttctactaagtgtagatttttttnnnnnnnnnnaagcttggcgtggatccgatatcaactagatcttgagacaaatggcagtattcatccacaattttaaaagaaaaggggggattggggggtacagtgcaggggaaagaatagtagacataatagcaacagacatacaaactaaag

SEQ ID NO: 21116 - DNA, 301 bp, Artificial Sequence
  NTC.5_NTC.20
  crRNA array
  misc_feature (148)..(157): n is a, c, g, or t
cttggctttatatatcttgtggaaaggacgaaacaccgtaatttctactaagtgtagatgcttacgcgtcgcgaatgtataatttctactaagtgtagatattccggcgcgaccagaagataatttctactaagtgtagatttttttnnnnnnnnnnaagcttggcgtggatccgatatcaactagatcttgagacaaatggcagtattcatccacaattttaaaagaaaaggggggattggggggtacagtgcaggggaaagaatagtagacataatagcaacagacatacaaactaaag

SEQ ID NO: 21117 - DNA, 301 bp, Artificial Sequence
  NTC.5_NTC.48
  crRNA array
  misc_feature (148)..(157): n is a, c, g, or t
cttggctttatatatcttgtggaaaggacgaaacaccgtaatttctactaagtgtagatgcttacgcgtcgcgaatgtataatttctactaagtgtagatcggtcgactacggctgttagtaatttctactaagtgtagatttttttnnnnnnnnnnaagcttggcgtggatccgatatcaactagatcttgagacaaatggcagtattcatccacaattttaaaagaaaaggggggattggggggtacagtgcaggggaaagaatagtagacataatagcaacagacatacaaactaaag

SEQ ID NO: 21118 - DNA, 301 bp, Artificial Sequence
  NTC.5_NTC.26
  crRNA array
  misc_feature (148)..(157): n is a, c, g, or t
cttggctttatatatcttgtggaaaggacgaaacaccgtaatttctactaagtgtagatgcttacgcgtcgcgaatgtataatttctactaagtgtagatcgcgacggcggttttaacactaatttctactaagtgtagatttttttnnnnnnnnnnaagcttggcgtggatccgatatcaactagatcttgagacaaatggcagtattcatccacaattttaaaagaaaaggggggattggggggtacagtgcaggggaaagaatagtagacataatagcaacagacatacaaactaaag

SEQ ID NO: 21119 - DNA, 301 bp, Artificial Sequence
  NTC.5_NTC.27
  crRNA array
  misc_feature (148)..(157): n is a, c, g, or t
cttggctttatatatcttgtggaaaggacgaaacaccgtaatttctactaagtgtagatgcttacgcgtcgcgaatgtataatttctactaagtgtagatgtcgcgttgcgaccggcgcttaatttctactaagtgtagatttttttnnnnnnnnnnaagcttggcgtggatccgatatcaactagatcttgagacaaatggcagtattcatccacaattttaaaagaaaaggggggattggggggtacagtgcaggggaaagaatagtagacataatagcaacagacatacaaactaaag

SEQ ID NO: 21120 - DNA, 301 bp, Artificial Sequence
  NTC.5_NTC.34
  crRNA array
  misc_feature (148)..(157): n is a, c, g, or t
cttggctttatatatcttgtggaaaggacgaaacaccgtaatttctactaagtgtagatgcttacgcgtcgcgaatgtataatttctactaagtgtagattagcgttcgacacgtgaaactaatttctactaagtgtagatttttttnnnnnnnnnnaagcttggcgtggatccgatatcaactagatcttgagacaaatggcagtattcatccacaattttaaaagaaaaggggggattggggggtacagtgcaggggaaagaatagtagacataatagcaacagacatacaaactaaag

SEQ ID NO: 21121 - DNA, 301 bp, Artificial Sequence
  NTC.5_NTC.16
  crRNA array
  misc_feature (148)..(157): n is a, c, g, or t
cttggctttatatatcttgtggaaaggacgaaacaccgtaatttctactaagtgtagatgcttacgcgtcgcgaatgtataatttctactaagtgtagatcggtacgttagacgaaaatttaatttctactaagtgtagatttttttnnnnnnnnnnaagcttggcgtggatccgatatcaactagatcttgagacaaatggcagtattcatccacaattttaaaagaaaaggggggattggggggtacagtgcaggggaaagaatagtagacataatagcaacagacatacaaactaaag

SEQ ID NO: 21122 - DNA, 301 bp, Artificial Sequence
  NTC.5_NTC.4
  crRNA array
  misc_feature (148)..(157): n is a, c, g, or t
cttggctttatatatcttgtggaaaggacgaaacaccgtaatttctactaagtgtagatgcttacgcgtcgcgaatgtataatttctactaagtgtagatatacccgtcgcgaacgtgagtaatttctactaagtgtagatttttttnnnnnnnnnnaagcttggcgtggatccgatatcaactagatcttgagacaaatggcagtattcatccacaattttaaaagaaaaggggggattggggggtacagtgcaggggaaagaatagtagacataatagcaacagacatacaaactaaag

SEQ ID NO: 21123 - DNA, 301 bp, Artificial Sequence
  NTC.5_NTC.42
  crRNA array
  misc_feature (148)..(157): n is a, c, g, or t
cttggctttatatatcttgtggaaaggacgaaacaccgtaatttctactaagtgtagatgcttacgcgtcgcgaatgtataatttctactaagtgtagatggtcaaatcgcggcgataactaatttctactaagtgtagatttttttnnnnnnnnnnaagcttggcgtggatccgatatcaactagatcttgagacaaatggcagtattcatccacaattttaaaagaaaaggggggattggggggtacagtgcaggggaaagaatagtagacataatagcaacagacatacaaactaaag

SEQ ID NO: 21124 - DNA, 301 bp, Artificial Sequence
  NTC.5_NTC.22
  crRNA array
  misc_feature (148)..(157): n is a, c, g, or t
cttggctttatatatcttgtggaaaggacgaaacaccgtaatttctactaagtgtagatgcttacgcgtcgcgaatgtataatttctactaagtgtagatgcgcgtcaacgtaatgtgcctaatttctactaagtgtagatttttttnnnnnnnnnnaagcttggcgtggatccgatatcaactagatcttgagacaaatggcagtattcatccacaattttaaaagaaaaggggggattggggggtacagtgcaggggaaagaatagtagacataatagcaacagacatacaaactaaag

SEQ ID NO: 21125 - DNA, 301 bp, Artificial Sequence
  NTC.5_NTC.17
  crRNA array
  misc_feature (148)..(157): n is a, c, g, or t
cttggctttatatatcttgtggaaaggacgaaacaccgtaatttctactaagtgtagatgcttacgcgtcgcgaatgtataatttctactaagtgtagattatcgaacgctatcgaacgttaatttctactaagtgtagatttttttnnnnnnnnnnaagcttggcgtggatccgatatcaactagatcttgagacaaatggcagtattcatccacaattttaaaagaaaaggggggattggggggtacagtgcaggggaaagaatagtagacataatagcaacagacatacaaactaaag

SEQ ID NO: 21126 - DNA, 301 bp, Artificial Sequence
  NTC.5_NTC.9
  crRNA array
  misc_feature (148)..(157): n is a, c, g, or t
cttggctttatatatcttgtggaaaggacgaaacaccgtaatttctactaagtgtagatgcttacgcgtcgcgaatgtataatttctactaagtgtagatatcgccgtacggctatggcataatttctactaagtgtagatttttttnnnnnnnnnnaagcttggcgtggatccgatatcaactagatcttgagacaaatggcagtattcatccacaattttaaaagaaaaggggggattggggggtacagtgcaggggaaagaatagtagacataatagcaacagacatacaaactaaag

SEQ ID NO: 21127 - DNA, 301 bp, Artificial Sequence
  NTC.5_NTC.30
  crRNA array
  misc_feature (148)..(157): n is a, c, g, or t
cttggctttatatatcttgtggaaaggacgaaacaccgtaatttctactaagtgtagatgcttacgcgtcgcgaatgtataatttctactaagtgtagatcgatcgtacgggtgtcctaataatttctactaagtgtagatttttttnnnnnnnnnnaagcttggcgtggatccgatatcaactagatcttgagacaaatggcagtattcatccacaattttaaaagaaaaggggggattggggggtacagtgcaggggaaagaatagtagacataatagcaacagacatacaaactaaag

SEQ ID NO: 21128 - DNA, 301 bp, Artificial Sequence
  NTC.5_NTC.8
  crRNA array
  misc_feature (148)..(157): n is a, c, g, or t
cttggctttatatatcttgtggaaaggacgaaacaccgtaatttctactaagtgtagatgcttacgcgtcgcgaatgtataatttctactaagtgtagatcgaccgaggttacgctgggataatttctactaagtgtagatttttttnnnnnnnnnnaagcttggcgtggatccgatatcaactagatcttgagacaaatggcagtattcatccacaattttaaaagaaaaggggggattggggggtacagtgcaggggaaagaatagtagacataatagcaacagacatacaaactaaag

SEQ ID NO: 21129 - DNA, 301 bp, Artificial Sequence
  NTC.5_NTC.46
  crRNA array
  misc_feature (148)..(157): n is a, c, g, or t
cttggctttatatatcttgtggaaaggacgaaacaccgtaatttctactaagtgtagatgcttacgcgtcgcgaatgtataatttctactaagtgtagatagcgggtcgtagacgcgcggtaatttctactaagtgtagatttttttnnnnnnnnnnaagcttggcgtggatccgatatcaactagatcttgagacaaatggcagtattcatccacaattttaaaagaaaaggggggattggggggtacagtgcaggggaaagaatagtagacataatagcaacagacatacaaactaaag

SEQ ID NO: 21130 - DNA, 301 bp, Artificial Sequence
  NTC.5_NTC.35
  crRNA array
  misc_feature (148)..(157): n is a, c, g, or t
cttggctttatatatcttgtggaaaggacgaaacaccgtaatttctactaagtgtagatgcttacgcgtcgcgaatgtataatttctactaagtgtagattggcgcgtaatcgctattcgtaatttctactaagtgtagatttttttnnnnnnnnnnaagcttggcgtggatccgatatcaactagatcttgagacaaatggcagtattcatccacaattttaaaagaaaaggggggattggggggtacagtgcaggggaaagaatagtagacataatagcaacagacatacaaactaaag

SEQ ID NO: 21131 - DNA, 301 bp, Artificial Sequence
  NTC.5_NTC.10
  crRNA array
  misc_feature (148)..(157): n is a, c, g, or t
cttggctttatatatcttgtggaaaggacgaaacaccgtaatttctactaagtgtagatgcttacgcgtcgcgaatgtataatttctactaagtgtagatcgctaagttcgcgcgggccgtaatttctactaagtgtagatttttttnnnnnnnnnnaagcttggcgtggatccgatatcaactagatcttgagacaaatggcagtattcatccacaattttaaaagaaaaggggggattggggggtacagtgcaggggaaagaatagtagacataatagcaacagacatacaaactaaag

SEQ ID NO: 21132 - DNA, 301 bp, Artificial Sequence
  NTC.5_NTC.11
  crRNA array
  misc_feature (148)..(157): n is a, c, g, or t
cttggctttatatatcttgtggaaaggacgaaacaccgtaatttctactaagtgtagatgcttacgcgtcgcgaatgtataatttctactaagtgtagatcgttcgtcgacgaagcaatctaatttctactaagtgtagatttttttnnnnnnnnnnaagcttggcgtggatccgatatcaactagatcttgagacaaatggcagtattcatccacaattttaaaagaaaaggggggattggggggtacagtgcaggggaaagaatagtagacataatagcaacagacatacaaactaaag

SEQ ID NO: 21133 - DNA, 301 bp, Artificial Sequence
  NTC.5_NTC.14
  crRNA array
  misc_feature (148)..(157): n is a, c, g, or t
cttggctttatatatcttgtggaaaggacgaaacaccgtaatttctactaagtgtagatgcttacgcgtcgcgaatgtataatttctactaagtgtagatccgttcgtgcgatagtgttttaatttctactaagtgtagatttttttnnnnnnnnnnaagcttggcgtggatccgatatcaactagatcttgagacaaatggcagtattcatccacaattttaaaagaaaaggggggattggggggtacagtgcaggggaaagaatagtagacataatagcaacagacatacaaactaaag

SEQ ID NO: 21134 - DNA, 301 bp, Artificial Sequence
  NTC.5_NTC.28
  crRNA array
  misc_feature (148)..(157): n is a, c, g, or t
cttggctttatatatcttgtggaaaggacgaaacaccgtaatttctactaagtgtagatgcttacgcgtcgcgaatgtataatttctactaagtgtagataccgctaatcggcgtaaacttaatttctactaagtgtagatttttttnnnnnnnnnnaagcttggcgtggatccgatatcaactagatcttgagacaaatggcagtattcatccacaattttaaaagaaaaggggggattggggggtacagtgcaggggaaagaatagtagacataatagcaacagacatacaaactaaag

SEQ ID NO: 21135 - DNA, 301 bp, Artificial Sequence
  NTC.33_NTC.1
  crRNA array
  misc_feature (148)..(157): n is a, c, g, or t
cttggctttatatatcttgtggaaaggacgaaacaccgtaatttctactaagtgtagattaagcgaccgacgcattcgctaatttctactaagtgtagatcgcgtaaccgttccggctcctaatttctactaagtgtagatttttttnnnnnnnnnnaagcttggcgtggatccgatatcaactagatcttgagacaaatggcagtattcatccacaattttaaaagaaaaggggggattggggggtacagtgcaggggaaagaatagtagacataatagcaacagacatacaaactaaag

SEQ ID NO: 21136 - DNA, 301 bp, Artificial Sequence
  NTC.33_NTC.6
  crRNA array
  misc_feature (148)..(157): n is a, c, g, or t
cttggctttatatatcttgtggaaaggacgaaacaccgtaatttctactaagtgtagattaagcgaccgacgcattcgctaatttctactaagtgtagatcgaatcgcgcctacgggaattaatttctactaagtgtagatttttttnnnnnnnnnnaagcttggcgtggatccgatatcaactagatcttgagacaaatggcagtattcatccacaattttaaaagaaaaggggggattggggggtacagtgcaggggaaagaatagtagacataatagcaacagacatacaaactaaag

SEQ ID NO: 21137 - DNA, 301 bp, Artificial Sequence
  NTC.33_NTC.38
  crRNA array
  misc_feature (148)..(157): n is a, c, g, or t
cttggctttatatatcttgtggaaaggacgaaacaccgtaatttctactaagtgtagattaagcgaccgacgcattcgctaatttctactaagtgtagataacggagcgcgatactaccataatttctactaagtgtagatttttttnnnnnnnnnnaagcttggcgtggatccgatatcaactagatcttgagacaaatggcagtattcatccacaattttaaaagaaaaggggggattggggggtacagtgcaggggaaagaatagtagacataatagcaacagacatacaaactaaag

SEQ ID NO: 21138 - DNA, 301 bp, Artificial Sequence
  NTC.33_NTC.41
  crRNA array
  misc_feature (148)..(157): n is a, c, g, or t
cttggctttatatatcttgtggaaaggacgaaacaccgtaatttctactaagtgtagattaagcgaccgacgcattcgctaatttctactaagtgtagatttgatggcgcgacgcgttattaatttctactaagtgtagatttttttnnnnnnnnnnaagcttggcgtggatccgatatcaactagatcttgagacaaatggcagtattcatccacaattttaaaagaaaaggggggattggggggtacagtgcaggggaaagaatagtagacataatagcaacagacatacaaactaaag

SEQ ID NO: 21139 - DNA, 301 bp, Artificial Sequence
  NTC.33_NTC.18
  crRNA array
  misc_feature (148)..(157): n is a, c, g, or t
cttggctttatatatcttgtggaaaggacgaaacaccgtaatttctactaagtgtagattaagcgaccgacgcattcgctaatttctactaagtgtagattccggttacgaccggcaaaataatttctactaagtgtagatttttttnnnnnnnnnnaagcttggcgtggatccgatatcaactagatcttgagacaaatggcagtattcatccacaattttaaaagaaaaggggggattggggggtacagtgcaggggaaagaatagtagacataatagcaacagacatacaaactaaag

SEQ ID NO: 21140 - DNA, 301 bp, Artificial Sequence
  NTC.33_NTC.24
  crRNA array
  misc_feature (148)..(157): n is a, c, g, or t
cttggctttatatatcttgtggaaaggacgaaacaccgtaatttctactaagtgtagattaagcgaccgacgcattcgctaatttctactaagtgtagatactatcgacgttcgtcccggtaatttctactaagtgtagatttttttnnnnnnnnnnaagcttggcgtggatccgatatcaactagatcttgagacaaatggcagtattcatccacaattttaaaagaaaaggggggattggggggtacagtgcaggggaaagaatagtagacataatagcaacagacatacaaactaaag

SEQ ID NO: 21141 - DNA, 301 bp, Artificial Sequence
  NTC.33_NTC.31
  crRNA array
  misc_feature (148)..(157): n is a, c, g, or t
cttggctttatatatcttgtggaaaggacgaaacaccgtaatttctactaagtgtagattaagcgaccgacgcattcgctaatttctactaagtgtagatgccgaccgcgtgattgtaggtaatttctactaagtgtagatttttttnnnnnnnnnnaagcttggcgtggatccgatatcaactagatcttgagacaaatggcagtattcatccacaattttaaaagaaaaggggggattggggggtacagtgcaggggaaagaatagtagacataatagcaacagacatacaaactaaag

SEQ ID NO: 21142 - DNA, 301 bp, Artificial Sequence
  NTC.33_NTC.51
  crRNA array
  misc_feature (148)..(157): n is a, c, g, or t
cttggctttatatatcttgtggaaaggacgaaacaccgtaatttctactaagtgtagattaagcgaccgacgcattcgctaatttctactaagtgtagattaacgcgcaacacgccaatgtaatttctactaagtgtagatttttttnnnnnnnnnnaagcttggcgtggatccgatatcaactagatcttgagacaaatggcagtattcatccacaattttaaaagaaaaggggggattggggggtacagtgcaggggaaagaatagtagacataatagcaacagacatacaaactaaag

SEQ ID NO: 21143 - DNA, 301 bp, Artificial Sequence
  NTC.33_NTC.23
  crRNA array
  misc_feature (148)..(157): n is a, c, g, or t
cttggctttatatatcttgtggaaaggacgaaacaccgtaatttctactaagtgtagattaagcgaccgacgcattcgctaatttctactaagtgtagatacgcgctattatcgtaggtgtaatttctactaagtgtagatttttttnnnnnnnnnnaagcttggcgtggatccgatatcaactagatcttgagacaaatggcagtattcatccacaattttaaaagaaaaggggggattggggggtacagtgcaggggaaagaatagtagacataatagcaacagacatacaaactaaag

SEQ ID NO: 21144 - DNA, 301 bp, Artificial Sequence
  NTC.33_NTC.36
  crRNA array
  misc_feature (148)..(157): n is a, c, g, or t
cttggctttatatatcttgtggaaaggacgaaacaccgtaatttctactaagtgtagattaagcgaccgacgcattcgctaatttctactaagtgtagatcaacccgccgtagcgggccttaatttctactaagtgtagatttttttnnnnnnnnnnaagcttggcgtggatccgatatcaactagatcttgagacaaatggcagtattcatccacaattttaaaagaaaaggggggattggggggtacagtgcaggggaaagaatagtagacataatagcaacagacatacaaactaaag

SEQ ID NO: 21145 - DNA, 301 bp, Artificial Sequence
  NTC.33_NTC.15
  crRNA array
  misc_feature (148)..(157): n is a, c, g, or t
cttggctttatatatcttgtggaaaggacgaaacaccgtaatttctactaagtgtagattaagcgaccgacgcattcgctaatttctactaagtgtagatgttgtcgtgccgcgaatttataatttctactaagtgtagatttttttnnnnnnnnnnaagcttggcgtggatccgatatcaactagatcttgagacaaatggcagtattcatccacaattttaaaagaaaaggggggattggggggtacagtgcaggggaaagaatagtagacataatagcaacagacatacaaactaaag

SEQ ID NO: 21146 - DNA, 301 bp, Artificial Sequence
  NTC.33_NTC.45
  crRNA array
  misc_feature (148)..(157): n is a, c, g, or t
cttggctttatatatcttgtggaaaggacgaaacaccgtaatttctactaagtgtagattaagcgaccgacgcattcgctaatttctactaagtgtagatcggaacgcgtgatactagggtaatttctactaagtgtagatttttttnnnnnnnnnnaagcttggcgtggatccgatatcaactagatcttgagacaaatggcagtattcatccacaattttaaaagaaaaggggggattggggggtacagtgcaggggaaagaatagtagacataatagcaacagacatacaaactaaag

SEQ ID NO: 21147 - DNA, 301 bp, Artificial Sequence
  NTC.33_NTC.12
  crRNA array
  misc_feature (148)..(157): n is a, c, g, or t
cttggctttatatatcttgtggaaaggacgaaacaccgtaatttctactaagtgtagattaagcgaccgacgcattcgctaatttctactaagtgtagatcgccgacgattaatcaatagtaatttctactaagtgtagatttttttnnnnnnnnnnaagcttggcgtggatccgatatcaactagatcttgagacaaatggcagtattcatccacaattttaaaagaaaaggggggattggggggtacagtgcaggggaaagaatagtagacataatagcaacagacatacaaactaaag

SEQ ID NO: 21148 - DNA, 301 bp, Artificial Sequence
  NTC.33_NTC.19
  crRNA array
  misc_feature (148)..(157): n is a, c, g, or t
cttggctttatatatcttgtggaaaggacgaaacaccgtaatttctactaagtgtagattaagcgaccgacgcattcgctaatttctactaagtgtagatcgtcgtagaacgatacccgataatttctactaagtgtagatttttttnnnnnnnnnnaagcttggcgtggatccgatatcaactagatcttgagacaaatggcagtattcatccacaattttaaaagaaaaggggggattggggggtacagtgcaggggaaagaatagtagacataatagcaacagacatacaaactaaag

SEQ ID NO: 21149 - DNA, 301 bp, Artificial Sequence
  NTC.33_NTC.20
  crRNA array
  misc_feature (148)..(157): n is a, c, g, or t
cttggctttatatatcttgtggaaaggacgaaacaccgtaatttctactaagtgtagattaagcgaccgacgcattcgctaatttctactaagtgtagatattccggcgcgaccagaagataatttctactaagtgtagatttttttnnnnnnnnnnaagcttggcgtggatccgatatcaactagatcttgagacaaatggcagtattcatccacaattttaaaagaaaaggggggattggggggtacagtgcaggggaaagaatagtagacataatagcaacagacatacaaactaaag

SEQ ID NO: 21150 - DNA, 301 bp, Artificial Sequence
  NTC.33_NTC.48
  crRNA array
  misc_feature (148)..(157): n is a, c, g, or t
cttggctttatatatcttgtggaaaggacgaaacaccgtaatttctactaagtgtagattaagcgaccgacgcattcgctaatttctactaagtgtagatcggtcgactacggctgttagtaatttctactaagtgtagatttttttnnnnnnnnnnaagcttggcgtggatccgatatcaactagatcttgagacaaatggcagtattcatccacaattttaaaagaaaaggggggattggggggtacagtgcaggggaaagaatagtagacataatagcaacagacatacaaactaaag

SEQ ID NO: 21151 - DNA, 301 bp, Artificial Sequence
  NTC.33_NTC.26
  crRNA array
  misc_feature (148)..(157): n is a, c, g, or t
cttggctttatatatcttgtggaaaggacgaaacaccgtaatttctactaagtgtagattaagcgaccgacgcattcgctaatttctactaagtgtagatcgcgacggcggttttaacactaatttctactaagtgtagatttttttnnnnnnnnnnaagcttggcgtggatccgatatcaactagatcttgagacaaatggcagtattcatccacaattttaaaagaaaaggggggattggggggtacagtgcaggggaaagaatagtagacataatagcaacagacatacaaactaaag

SEQ ID NO: 21152 - DNA, 301 bp, Artificial Sequence
  NTC.33_NTC.27
  crRNA array
  misc_feature (148)..(157): n is a, c, g, or t
cttggctttatatatcttgtggaaaggacgaaacaccgtaatttctactaagtgtagattaagcgaccgacgcattcgctaatttctactaagtgtagatgtcgcgttgcgaccggcgcttaatttctactaagtgtagatttttttnnnnnnnnnnaagcttggcgtggatccgatatcaactagatcttgagacaaatggcagtattcatccacaattttaaaagaaaaggggggattggggggtacagtgcaggggaaagaatagtagacataatagcaacagacatacaaactaaag

SEQ ID NO: 21153 - DNA, 301 bp, Artificial Sequence
  NTC.33_NTC.34
  crRNA array
  misc_feature (148)..(157): n is a, c, g, or t
cttggctttatatatcttgtggaaaggacgaaacaccgtaatttctactaagtgtagattaagcgaccgacgcattcgctaatttctactaagtgtagattagcgttcgacacgtgaaactaatttctactaagtgtagatttttttnnnnnnnnnnaagcttggcgtggatccgatatcaactagatcttgagacaaatggcagtattcatccacaattttaaaagaaaaggggggattggggggtacagtgcaggggaaagaatagtagacataatagcaacagacatacaaactaaag

SEQ ID NO: 21154 - DNA, 301 bp, Artificial Sequence
  NTC.33_NTC.16
  crRNA array
  misc_feature (148)..(157): n is a, c, g, or t
cttggctttatatatcttgtggaaaggacgaaacaccgtaatttctactaagtgtagattaagcgaccgacgcattcgctaatttctactaagtgtagatcggtacgttagacgaaaatttaatttctactaagtgtagatttttttnnnnnnnnnnaagcttggcgtggatccgatatcaactagatcttgagacaaatggcagtattcatccacaattttaaaagaaaaggggggattggggggtacagtgcaggggaaagaatagtagacataatagcaacagacatacaaactaaag

SEQ ID NO: 21155 - DNA, 301 bp, Artificial Sequence
  NTC.33_NTC.4
  crRNA array
  misc_feature (148)..(157): n is a, c, g, or t
cttggctttatatatcttgtggaaaggacgaaacaccgtaatttctactaagtgtagattaagcgaccgacgcattcgctaatttctactaagtgtagatatacccgtcgcgaacgtgagtaatttctactaagtgtagatttttttnnnnnnnnnnaagcttggcgtggatccgatatcaactagatcttgagacaaatggcagtattcatccacaattttaaaagaaaaggggggattggggggtacagtgcaggggaaagaatagtagacataatagcaacagacatacaaactaaag

SEQ ID NO: 21156 - DNA, 301 bp, Artificial Sequence
  NTC.33_NTC.42
  crRNA array
  misc_feature (148)..(157): n is a, c, g, or t
cttggctttatatatcttgtggaaaggacgaaacaccgtaatttctactaagtgtagattaagcgaccgacgcattcgctaatttctactaagtgtagatggtcaaatcgcggcgataactaatttctactaagtgtagatttttttnnnnnnnnnnaagcttggcgtggatccgatatcaactagatcttgagacaaatggcagtattcatccacaattttaaaagaaaaggggggattggggggtacagtgcaggggaaagaatagtagacataatagcaacagacatacaaactaaag

SEQ ID NO: 21157 - DNA, 301 bp, Artificial Sequence
  NTC.33_NTC.22
  crRNA array
  misc_feature (148)..(157): n is a, c, g, or t
cttggctttatatatcttgtggaaaggacgaaacaccgtaatttctactaagtgtagattaagcgaccgacgcattcgctaatttctactaagtgtagatgcgcgtcaacgtaatgtgcctaatttctactaagtgtagatttttttnnnnnnnnnnaagcttggcgtggatccgatatcaactagatcttgagacaaatggcagtattcatccacaattttaaaagaaaaggggggattggggggtacagtgcaggggaaagaatagtagacataatagcaacagacatacaaactaaag

SEQ ID NO: 21158 - DNA, 301 bp, Artificial Sequence
  NTC.33_NTC.17
  crRNA array
  misc_feature (148)..(157): n is a, c, g, or t
cttggctttatatatcttgtggaaaggacgaaacaccgtaatttctactaagtgtagattaagcgaccgacgcattcgctaatttctactaagtgtagattatcgaacgctatcgaacgttaatttctactaagtgtagatttttttnnnnnnnnnnaagcttggcgtggatccgatatcaactagatcttgagacaaatggcagtattcatccacaattttaaaagaaaaggggggattggggggtacagtgcaggggaaagaatagtagacataatagcaacagacatacaaactaaag

SEQ ID NO: 21159 - DNA, 301 bp, Artificial Sequence
  NTC.33_NTC.9
  crRNA array
  misc_feature (148)..(157): n is a, c, g, or t
cttggctttatatatcttgtggaaaggacgaaacaccgtaatttctactaagtgtagattaagcgaccgacgcattcgctaatttctactaagtgtagatatcgccgtacggctatggcataatttctactaagtgtagatttttttnnnnnnnnnnaagcttggcgtggatccgatatcaactagatcttgagacaaatggcagtattcatccacaattttaaaagaaaaggggggattggggggtacagtgcaggggaaagaatagtagacataatagcaacagacatacaaactaaag

SEQ ID NO: 21160 - DNA, 301 bp, Artificial Sequence
  NTC.33_NTC.30
  crRNA array
  misc_feature (148)..(157): n is a, c, g, or t
cttggctttatatatcttgtggaaaggacgaaacaccgtaatttctactaagtgtagattaagcgaccgacgcattcgctaatttctactaagtgtagatcgatcgtacgggtgtcctaataatttctactaagtgtagatttttttnnnnnnnnnnaagcttggcgtggatccgatatcaactagatcttgagacaaatggcagtattcatccacaattttaaaagaaaaggggggattggggggtacagtgcaggggaaagaatagtagacataatagcaacagacatacaaactaaag

SEQ ID NO: 21161 - DNA, 301 bp, Artificial Sequence
  NTC.33_NTC.8
  crRNA array
  misc_feature (148)..(157): n is a, c, g, or t
cttggctttatatatcttgtggaaaggacgaaacaccgtaatttctactaagtgtagattaagcgaccgacgcattcgctaatttctactaagtgtagatcgaccgaggttacgctgggataatttctactaagtgtagatttttttnnnnnnnnnnaagcttggcgtggatccgatatcaactagatcttgagacaaatggcagtattcatccacaattttaaaagaaaaggggggattggggggtacagtgcaggggaaagaatagtagacataatagcaacagacatacaaactaaag

SEQ ID NO: 21162 - DNA, 301 bp, Artificial Sequence
  NTC.33_NTC.46
  crRNA array
  misc_feature (148)..(157): n is a, c, g, or t
cttggctttatatatcttgtggaaaggacgaaacaccgtaatttctactaagtgtagattaagcgaccgacgcattcgctaatttctactaagtgtagatagcgggtcgtagacgcgcggtaatttctactaagtgtagatttttttnnnnnnnnnnaagcttggcgtggatccgatatcaactagatcttgagacaaatggcagtattcatccacaattttaaaagaaaaggggggattggggggtacagtgcaggggaaagaatagtagacataatagcaacagacatacaaactaaag

SEQ ID NO: 21163 - DNA, 301 bp, Artificial Sequence
  NTC.33_NTC.35
  crRNA array
  misc_feature (148)..(157): n is a, c, g, or t
cttggctttatatatcttgtggaaaggacgaaacaccgtaatttctactaagtgtagattaagcgaccgacgcattcgctaatttctactaagtgtagattggcgcgtaatcgctattcgtaatttctactaagtgtagatttttttnnnnnnnnnnaagcttggcgtggatccgatatcaactagatcttgagacaaatggcagtattcatccacaattttaaaagaaaaggggggattggggggtacagtgcaggggaaagaatagtagacataatagcaacagacatacaaactaaag

SEQ ID NO: 21164 - DNA, 301 bp, Artificial Sequence
  NTC.33_NTC.10
  crRNA array
  misc_feature (148)..(157): n is a, c, g, or t
cttggctttatatatcttgtggaaaggacgaaacaccgtaatttctactaagtgtagattaagcgaccgacgcattcgctaatttctactaagtgtagatcgctaagttcgcgcgggccgtaatttctactaagtgtagatttttttnnnnnnnnnnaagcttggcgtggatccgatatcaactagatcttgagacaaatggcagtattcatccacaattttaaaagaaaaggggggattggggggtacagtgcaggggaaagaatagtagacataatagcaacagacatacaaactaaag

SEQ ID NO: 21165 - DNA, 301 bp, Artificial Sequence
  NTC.33_NTC.11
  crRNA array
  misc_feature (148)..(157): n is a, c, g, or t
cttggctttatatatcttgtggaaaggacgaaacaccgtaatttctactaagtgtagattaagcgaccgacgcattcgctaatttctactaagtgtagatcgttcgtcgacgaagcaatctaatttctactaagtgtagatttttttnnnnnnnnnnaagcttggcgtggatccgatatcaactagatcttgagacaaatggcagtattcatccacaattttaaaagaaaaggggggattggggggtacagtgcaggggaaagaatagtagacataatagcaacagacatacaaactaaag

SEQ ID NO: 21166 - DNA, 301 bp, Artificial Sequence
  NTC.33_NTC.14
  crRNA array
  misc_feature (148)..(157): n is a, c, g, or t
cttggctttatatatcttgtggaaaggacgaaacaccgtaatttctactaagtgtagattaagcgaccgacgcattcgctaatttctactaagtgtagatccgttcgtgcgatagtgttttaatttctactaagtgtagatttttttnnnnnnnnnnaagcttggcgtggatccgatatcaactagatcttgagacaaatggcagtattcatccacaattttaaaagaaaaggggggattggggggtacagtgcaggggaaagaatagtagacataatagcaacagacatacaaactaaag

SEQ ID NO: 21167 - DNA, 301 bp, Artificial Sequence
  NTC.33_NTC.28
  crRNA array
  misc_feature (148)..(157): n is a, c, g, or t
cttggctttatatatcttgtggaaaggacgaaacaccgtaatttctactaagtgtagattaagcgaccgacgcattcgctaatttctactaagtgtagataccgctaatcggcgtaaacttaatttctactaagtgtagatttttttnnnnnnnnnnaagcttggcgtggatccgatatcaactagatcttgagacaaatggcagtattcatccacaattttaaaagaaaaggggggattggggggtacagtgcaggggaaagaatagtagacataatagcaacagacatacaaactaaag

SEQ ID NO: 21168 - DNA, 301 bp, Artificial Sequence
  NTC.1_NTC.6
  crRNA array
  misc_feature (148)..(157): n is a, c, g, or t
cttggctttatatatcttgtggaaaggacgaaacaccgtaatttctactaagtgtagatcgcgtaaccgttccggctcctaatttctactaagtgtagatcgaatcgcgcctacgggaattaatttctactaagtgtagatttttttnnnnnnnnnnaagcttggcgtggatccgatatcaactagatcttgagacaaatggcagtattcatccacaattttaaaagaaaaggggggattggggggtacagtgcaggggaaagaatagtagacataatagcaacagacatacaaactaaag

SEQ ID NO: 21169 - DNA, 301 bp, Artificial Sequence
  NTC.1_NTC.38
  crRNA array
  misc_feature (148)..(157): n is a, c, g, or t
cttggctttatatatcttgtggaaaggacgaaacaccgtaatttctactaagtgtagatcgcgtaaccgttccggctcctaatttctactaagtgtagataacggagcgcgatactaccataatttctactaagtgtagatttttttnnnnnnnnnnaagcttggcgtggatccgatatcaactagatcttgagacaaatggcagtattcatccacaattttaaaagaaaaggggggattggggggtacagtgcaggggaaagaatagtagacataatagcaacagacatacaaactaaag

SEQ ID NO: 21170 - DNA, 301 bp, Artificial Sequence
  NTC.1_NTC.41
  crRNA array
  misc_feature (148)..(157): n is a, c, g, or t
cttggctttatatatcttgtggaaaggacgaaacaccgtaatttctactaagtgtagatcgcgtaaccgttccggctcctaatttctactaagtgtagatttgatggcgcgacgcgttattaatttctactaagtgtagatttttttnnnnnnnnnnaagcttggcgtggatccgatatcaactagatcttgagacaaatggcagtattcatccacaattttaaaagaaaaggggggattggggggtacagtgcaggggaaagaatagtagacataatagcaacagacatacaaactaaag

SEQ ID NO: 21171 - DNA, 301 bp, Artificial Sequence
  NTC.1_NTC.18
  crRNA array
  misc_feature (148)..(157): n is a, c, g, or t
cttggctttatatatcttgtggaaaggacgaaacaccgtaatttctactaagtgtagatcgcgtaaccgttccggctcctaatttctactaagtgtagattccggttacgaccggcaaaataatttctactaagtgtagatttttttnnnnnnnnnnaagcttggcgtggatccgatatcaactagatcttgagacaaatggcagtattcatccacaattttaaaagaaaaggggggattggggggtacagtgcaggggaaagaatagtagacataatagcaacagacatacaaactaaag

SEQ ID NO: 21172 - DNA, 301 bp, Artificial Sequence
  NTC.1_NTC.24
  crRNA array
  misc_feature (148)..(157): n is a, c, g, or t
cttggctttatatatcttgtggaaaggacgaaacaccgtaatttctactaagtgtagatcgcgtaaccgttccggctcctaatttctactaagtgtagatactatcgacgttcgtcccggtaatttctactaagtgtagatttttttnnnnnnnnnnaagcttggcgtggatccgatatcaactagatcttgagacaaatggcagtattcatccacaattttaaaagaaaaggggggattggggggtacagtgcaggggaaagaatagtagacataatagcaacagacatacaaactaaag

SEQ ID NO: 21173 - DNA, 301 bp, Artificial Sequence
  NTC.1_NTC.31
  crRNA array
  misc_feature (148)..(157): n is a, c, g, or t
cttggctttatatatcttgtggaaaggacgaaacaccgtaatttctactaagtgtagatcgcgtaaccgttccggctcctaatttctactaagtgtagatgccgaccgcgtgattgtaggtaatttctactaagtgtagatttttttnnnnnnnnnnaagcttggcgtggatccgatatcaactagatcttgagacaaatggcagtattcatccacaattttaaaagaaaaggggggattggggggtacagtgcaggggaaagaatagtagacataatagcaacagacatacaaactaaag

SEQ ID NO: 21174 - DNA, 301 bp, Artificial Sequence
  NTC.1_NTC.51
  crRNA array
  misc_feature (148)..(157): n is a, c, g, or t
cttggctttatatatcttgtggaaaggacgaaacaccgtaatttctactaagtgtagatcgcgtaaccgttccggctcctaatttctactaagtgtagattaacgcgcaacacgccaatgtaatttctactaagtgtagatttttttnnnnnnnnnnaagcttggcgtggatccgatatcaactagatcttgagacaaatggcagtattcatccacaattttaaaagaaaaggggggattggggggtacagtgcaggggaaagaatagtagacataatagcaacagacatacaaactaaag

SEQ ID NO: 21175 - DNA, 301 bp, Artificial Sequence
  NTC.1_NTC.23
  crRNA array
  misc_feature (148)..(157): n is a, c, g, or t
cttggctttatatatcttgtggaaaggacgaaacaccgtaatttctactaagtgtagatcgcgtaaccgttccggctcctaatttctactaagtgtagatacgcgctattatcgtaggtgtaatttctactaagtgtagatttttttnnnnnnnnnnaagcttggcgtggatccgatatcaactagatcttgagacaaatggcagtattcatccacaattttaaaagaaaaggggggattggggggtacagtgcaggggaaagaatagtagacataatagcaacagacatacaaactaaag

SEQ ID NO: 21176 - DNA, 301 bp, Artificial Sequence
  NTC.1_NTC.36
  crRNA array
  misc_feature (148)..(157): n is a, c, g, or t
cttggctttatatatcttgtggaaaggacgaaacaccgtaatttctactaagtgtagatcgcgtaaccgttccggctcctaatttctactaagtgtagatcaacccgccgtagcgggccttaatttctactaagtgtagatttttttnnnnnnnnnnaagcttggcgtggatccgatatcaactagatcttgagacaaatggcagtattcatccacaattttaaaagaaaaggggggattggggggtacagtgcaggggaaagaatagtagacataatagcaacagacatacaaactaaag

SEQ ID NO: 21177 - DNA, 301 bp, Artificial Sequence
  NTC.1_NTC.15
  crRNA array
  misc_feature (148)..(157): n is a, c, g, or t
cttggctttatatatcttgtggaaaggacgaaacaccgtaatttctactaagtgtagatcgcgtaaccgttccggctcctaatttctactaagtgtagatgttgtcgtgccgcgaatttataatttctactaagtgtagatttttttnnnnnnnnnnaagcttggcgtggatccgatatcaactagatcttgagacaaatggcagtattcatccacaattttaaaagaaaaggggggattggggggtacagtgcaggggaaagaatagtagacataatagcaacagacatacaaactaaag

SEQ ID NO: 21178 - DNA, 301 bp, Artificial Sequence
  NTC.1_NTC.45
  crRNA array
  misc_feature (148)..(157): n is a, c, g, or t
cttggctttatatatcttgtggaaaggacgaaacaccgtaatttctactaagtgtagatcgcgtaaccgttccggctcctaatttctactaagtgtagatcggaacgcgtgatactagggtaatttctactaagtgtagatttttttnnnnnnnnnnaagcttggcgtggatccgatatcaactagatcttgagacaaatggcagtattcatccacaattttaaaagaaaaggggggattggggggtacagtgcaggggaaagaatagtagacataatagcaacagacatacaaactaaag

SEQ ID NO: 21179 - DNA, 301 bp, Artificial Sequence
  NTC.1_NTC.12
  crRNA array
  misc_feature (148)..(157): n is a, c, g, or t
cttggctttatatatcttgtggaaaggacgaaacaccgtaatttctactaagtgtagatcgcgtaaccgttccggctcctaatttctactaagtgtagatcgccgacgattaatcaatagtaatttctactaagtgtagatttttttnnnnnnnnnnaagcttggcgtggatccgatatcaactagatcttgagacaaatggcagtattcatccacaattttaaaagaaaaggggggattggggggtacagtgcaggggaaagaatagtagacataatagcaacagacatacaaactaaag

SEQ ID NO: 21180 - DNA, 301 bp, Artificial Sequence
  NTC.1_NTC.19
  crRNA array
  misc_feature (148)..(157): n is a, c, g, or t
cttggctttatatatcttgtggaaaggacgaaacaccgtaatttctactaagtgtagatcgcgtaaccgttccggctcctaatttctactaagtgtagatcgtcgtagaacgatacccgataatttctactaagtgtagatttttttnnnnnnnnnnaagcttggcgtggatccgatatcaactagatcttgagacaaatggcagtattcatccacaattttaaaagaaaaggggggattggggggtacagtgcaggggaaagaatagtagacataatagcaacagacatacaaactaaag

SEQ ID NO: 21181 - DNA, 301 bp, Artificial Sequence
  NTC.1_NTC.20
  crRNA array
  misc_feature (148)..(157): n is a, c, g, or t
cttggctttatatatcttgtggaaaggacgaaacaccgtaatttctactaagtgtagatcgcgtaaccgttccggctcctaatttctactaagtgtagatattccggcgcgaccagaagataatttctactaagtgtagatttttttnnnnnnnnnnaagcttggcgtggatccgatatcaactagatcttgagacaaatggcagtattcatccacaattttaaaagaaaaggggggattggggggtacagtgcaggggaaagaatagtagacataatagcaacagacatacaaactaaag

SEQ ID NO: 21182 - DNA, 301 bp, Artificial Sequence
  NTC.1_NTC.48
  crRNA array
  misc_feature (148)..(157): n is a, c, g, or t
cttggctttatatatcttgtggaaaggacgaaacaccgtaatttctactaagtgtagatcgcgtaaccgttccggctcctaatttctactaagtgtagatcggtcgactacggctgttagtaatttctactaagtgtagatttttttnnnnnnnnnnaagcttggcgtggatccgatatcaactagatcttgagacaaatggcagtattcatccacaattttaaaagaaaaggggggattggggggtacagtgcaggggaaagaatagtagacataatagcaacagacatacaaactaaag

SEQ ID NO: 21183 - DNA, 301 bp, Artificial Sequence
  NTC.1_NTC.26
  crRNA array
  misc_feature (148)..(157): n is a, c, g, or t
cttggctttatatatcttgtggaaaggacgaaacaccgtaatttctactaagtgtagatcgcgtaaccgttccggctcctaatttctactaagtgtagatcgcgacggcggttttaacactaatttctactaagtgtagatttttttnnnnnnnnnnaagcttggcgtggatccgatatcaactagatcttgagacaaatggcagtattcatccacaattttaaaagaaaaggggggattggggggtacagtgcaggggaaagaatagtagacataatagcaacagacatacaaactaaag

SEQ ID NO: 21184 - DNA, 301 bp, Artificial Sequence
  NTC.1_NTC.27
  crRNA array
  misc_feature (148)..(157): n is a, c, g, or t
cttggctttatatatcttgtggaaaggacgaaacaccgtaatttctactaagtgtagatcgcgtaaccgttccggctcctaatttctactaagtgtagatgtcgcgttgcgaccggcgcttaatttctactaagtgtagatttttttnnnnnnnnnnaagcttggcgtggatccgatatcaactagatcttgagacaaatggcagtattcatccacaattttaaaagaaaaggggggattggggggtacagtgcaggggaaagaatagtagacataatagcaacagacatacaaactaaag

SEQ ID NO: 21185 - DNA, 301 bp, Artificial Sequence
  NTC.1_NTC.34
  crRNA array
  misc_feature (148)..(157): n is a, c, g, or t
cttggctttatatatcttgtggaaaggacgaaacaccgtaatttctactaagtgtagatcgcgtaaccgttccggctcctaatttctactaagtgtagattagcgttcgacacgtgaaactaatttctactaagtgtagatttttttnnnnnnnnnnaagcttggcgtggatccgatatcaactagatcttgagacaaatggcagtattcatccacaattttaaaagaaaaggggggattggggggtacagtgcaggggaaagaatagtagacataatagcaacagacatacaaactaaag

SEQ ID NO: 21186 - DNA, 301 bp, Artificial Sequence
  NTC.1_NTC.16
  crRNA array
  misc_feature (148)..(157): n is a, c, g, or t
cttggctttatatatcttgtggaaaggacgaaacaccgtaatttctactaagtgtagatcgcgtaaccgttccggctcctaatttctactaagtgtagatcggtacgttagacgaaaatttaatttctactaagtgtagatttttttnnnnnnnnnnaagcttggcgtggatccgatatcaactagatcttgagacaaatggcagtattcatccacaattttaaaagaaaaggggggattggggggtacagtgcaggggaaagaatagtagacataatagcaacagacatacaaactaaag

SEQ ID NO: 21187 - DNA, 301 bp, Artificial Sequence
  NTC.1_NTC.4
  crRNA array
  misc_feature (148)..(157): n is a, c, g, or t
cttggctttatatatcttgtggaaaggacgaaacaccgtaatttctactaagtgtagatcgcgtaaccgttccggctcctaatttctactaagtgtagatatacccgtcgcgaacgtgagtaatttctactaagtgtagatttttttnnnnnnnnnnaagcttggcgtggatccgatatcaactagatcttgagacaaatggcagtattcatccacaattttaaaagaaaaggggggattggggggtacagtgcaggggaaagaatagtagacataatagcaacagacatacaaactaaag

SEQ ID NO: 21188 - DNA, 301 bp, Artificial Sequence
  NTC.1_NTC.42
  crRNA array
  misc_feature (148)..(157): n is a, c, g, or t
cttggctttatatatcttgtggaaaggacgaaacaccgtaatttctactaagtgtagatcgcgtaaccgttccggctcctaatttctactaagtgtagatggtcaaatcgcggcgataactaatttctactaagtgtagatttttttnnnnnnnnnnaagcttggcgtggatccgatatcaactagatcttgagacaaatggcagtattcatccacaattttaaaagaaaaggggggattggggggtacagtgcaggggaaagaatagtagacataatagcaacagacatacaaactaaag

SEQ ID NO: 21189 - DNA, 301 bp, Artificial Sequence
  NTC.1_NTC.22
  crRNA array
  misc_feature (148)..(157): n is a, c, g, or t
cttggctttatatatcttgtggaaaggacgaaacaccgtaatttctactaagtgtagatcgcgtaaccgttccggctcctaatttctactaagtgtagatgcgcgtcaacgtaatgtgcctaatttctactaagtgtagatttttttnnnnnnnnnnaagcttggcgtggatccgatatcaactagatcttgagacaaatggcagtattcatccacaattttaaaagaaaaggggggattggggggtacagtgcaggggaaagaatagtagacataatagcaacagacatacaaactaaag

SEQ ID NO: 21190 - DNA, 301 bp, Artificial Sequence
  NTC.1_NTC.17
  crRNA array
  misc_feature (148)..(157): n is a, c, g, or t
cttggctttatatatcttgtggaaaggacgaaacaccgtaatttctactaagtgtagatcgcgtaaccgttccggctcctaatttctactaagtgtagattatcgaacgctatcgaacgttaatttctactaagtgtagatttttttnnnnnnnnnnaagcttggcgtggatccgatatcaactagatcttgagacaaatggcagtattcatccacaattttaaaagaaaaggggggattggggggtacagtgcaggggaaagaatagtagacataatagcaacagacatacaaactaaag

SEQ ID NO: 21191 - DNA, 301 bp, Artificial Sequence
  NTC.1_NTC.9
  crRNA array
  misc_feature (148)..(157): n is a, c, g, or t
cttggctttatatatcttgtggaaaggacgaaacaccgtaatttctactaagtgtagatcgcgtaaccgttccggctcctaatttctactaagtgtagatatcgccgtacggctatggcataatttctactaagtgtagatttttttnnnnnnnnnnaagcttggcgtggatccgatatcaactagatcttgagacaaatggcagtattcatccacaattttaaaagaaaaggggggattggggggtacagtgcaggggaaagaatagtagacataatagcaacagacatacaaactaaag

SEQ ID NO: 21192 - DNA, 301 bp, Artificial Sequence
  NTC.1_NTC.30
  crRNA array
  misc_feature (148)..(157): n is a, c, g, or t
cttggctttatatatcttgtggaaaggacgaaacaccgtaatttctactaagtgtagatcgcgtaaccgttccggctcctaatttctactaagtgtagatcgatcgtacgggtgtcctaataatttctactaagtgtagatttttttnnnnnnnnnnaagcttggcgtggatccgatatcaactagatcttgagacaaatggcagtattcatccacaattttaaaagaaaaggggggattggggggtacagtgcaggggaaagaatagtagacataatagcaacagacatacaaactaaag

SEQ ID NO: 21193 - DNA, 301 bp, Artificial Sequence
  NTC.1_NTC.8
  crRNA array
  misc_feature (148)..(157): n is a, c, g, or t
cttggctttatatatcttgtggaaaggacgaaacaccgtaatttctactaagtgtagatcgcgtaaccgttccggctcctaatttctactaagtgtagatcgaccgaggttacgctgggataatttctactaagtgtagatttttttnnnnnnnnnnaagcttggcgtggatccgatatcaactagatcttgagacaaatggcagtattcatccacaattttaaaagaaaaggggggattggggggtacagtgcaggggaaagaatagtagacataatagcaacagacatacaaactaaag

SEQ ID NO: 21194 - DNA, 301 bp, Artificial Sequence
  NTC.1_NTC.46
  crRNA array
  misc_feature (148)..(157): n is a, c, g, or t
cttggctttatatatcttgtggaaaggacgaaacaccgtaatttctactaagtgtagatcgcgtaaccgttccggctcctaatttctactaagtgtagatagcgggtcgtagacgcgcggtaatttctactaagtgtagatttttttnnnnnnnnnnaagcttggcgtggatccgatatcaactagatcttgagacaaatggcagtattcatccacaattttaaaagaaaaggggggattggggggtacagtgcaggggaaagaatagtagacataatagcaacagacatacaaactaaag

SEQ ID NO: 21195 - DNA, 301 bp, Artificial Sequence
  NTC.1_NTC.35
  crRNA array
  misc_feature (148)..(157): n is a, c, g, or t
cttggctttatatatcttgtggaaaggacgaaacaccgtaatttctactaagtgtagatcgcgtaaccgttccggctcctaatttctactaagtgtagattggcgcgtaatcgctattcgtaatttctactaagtgtagatttttttnnnnnnnnnnaagcttggcgtggatccgatatcaactagatcttgagacaaatggcagtattcatccacaattttaaaagaaaaggggggattggggggtacagtgcaggggaaagaatagtagacataatagcaacagacatacaaactaaag

SEQ ID NO: 21196 - DNA, 301 bp, Artificial Sequence
  NTC.1_NTC.10
  crRNA array
  misc_feature (148)..(157): n is a, c, g, or t
cttggctttatatatcttgtggaaaggacgaaacaccgtaatttctactaagtgtagatcgcgtaaccgttccggctcctaatttctactaagtgtagatcgctaagttcgcgcgggccgtaatttctactaagtgtagatttttttnnnnnnnnnnaagcttggcgtggatccgatatcaactagatcttgagacaaatggcagtattcatccacaattttaaaagaaaaggggggattggggggtacagtgcaggggaaagaatagtagacataatagcaacagacatacaaactaaag

SEQ ID NO: 21197 - DNA, 301 bp, Artificial Sequence
  NTC.1_NTC.11
  crRNA array
  misc_feature (148)..(157): n is a, c, g, or t
cttggctttatatatcttgtggaaaggacgaaacaccgtaatttctactaagtgtagatcgcgtaaccgttccggctcctaatttctactaagtgtagatcgttcgtcgacgaagcaatctaatttctactaagtgtagatttttttnnnnnnnnnnaagcttggcgtggatccgatatcaactagatcttgagacaaatggcagtattcatccacaattttaaaagaaaaggggggattggggggtacagtgcaggggaaagaatagtagacataatagcaacagacatacaaactaaag

SEQ ID NO: 21198 - DNA, 301 bp, Artificial Sequence
  NTC.1_NTC.14
  crRNA array
  misc_feature (148)..(157): n is a, c, g, or t
cttggctttatatatcttgtggaaaggacgaaacaccgtaatttctactaagtgtagatcgcgtaaccgttccggctcctaatttctactaagtgtagatccgttcgtgcgatagtgttttaatttctactaagtgtagatttttttnnnnnnnnnnaagcttggcgtggatccgatatcaactagatcttgagacaaatggcagtattcatccacaattttaaaagaaaaggggggattggggggtacagtgcaggggaaagaatagtagacataatagcaacagacatacaaactaaag

SEQ ID NO: 21199 - DNA, 301 bp, Artificial Sequence
  NTC.1_NTC.28
  crRNA array
  misc_feature (148)..(157): n is a, c, g, or t
cttggctttatatatcttgtggaaaggacgaaacaccgtaatttctactaagtgtagatcgcgtaaccgttccggctcctaatttctactaagtgtagataccgctaatcggcgtaaacttaatttctactaagtgtagatttttttnnnnnnnnnnaagcttggcgtggatccgatatcaactagatcttgagacaaatggcagtattcatccacaattttaaaagaaaaggggggattggggggtacagtgcaggggaaagaatagtagacataatagcaacagacatacaaactaaag

SEQ ID NO: 21200 - DNA, 301 bp, Artificial Sequence
  NTC.6_NTC.38
  crRNA array
  misc_feature (148)..(157): n is a, c, g, or t
cttggctttatatatcttgtggaaaggacgaaacaccgtaatttctactaagtgtagatcgaatcgcgcctacgggaattaatttctactaagtgtagataacggagcgcgatactaccataatttctactaagtgtagatttttttnnnnnnnnnnaagcttggcgtggatccgatatcaactagatcttgagacaaatggcagtattcatccacaattttaaaagaaaaggggggattggggggtacagtgcaggggaaagaatagtagacataatagcaacagacatacaaactaaag

SEQ ID NO: 21201 - DNA, 301 bp, Artificial Sequence
  NTC.6_NTC.41
  crRNA array
  misc_feature (148)..(157): n is a, c, g, or t
cttggctttatatatcttgtggaaaggacgaaacaccgtaatttctactaagtgtagatcgaatcgcgcctacgggaattaatttctactaagtgtagatttgatggcgcgacgcgttattaatttctactaagtgtagatttttttnnnnnnnnnnaagcttggcgtggatccgatatcaactagatcttgagacaaatggcagtattcatccacaattttaaaagaaaaggggggattggggggtacagtgcaggggaaagaatagtagacataatagcaacagacatacaaactaaag

SEQ ID NO: 21202 - DNA, 301 bp, Artificial Sequence
  NTC.6_NTC.18
  crRNA array
  misc_feature (148)..(157): n is a, c, g, or t
cttggctttatatatcttgtggaaaggacgaaacaccgtaatttctactaagtgtagatcgaatcgcgcctacgggaattaatttctactaagtgtagattccggttacgaccggcaaaataatttctactaagtgtagatttttttnnnnnnnnnnaagcttggcgtggatccgatatcaactagatcttgagacaaatggcagtattcatccacaattttaaaagaaaaggggggattggggggtacagtgcaggggaaagaatagtagacataatagcaacagacatacaaactaaag

SEQ ID NO: 21203 - DNA, 301 bp, Artificial Sequence
  NTC.6_NTC.24
  crRNA array
  misc_feature (148)..(157): n is a, c, g, or t
cttggctttatatatcttgtggaaaggacgaaacaccgtaatttctactaagtgtagatcgaatcgcgcctacgggaattaatttctactaagtgtagatactatcgacgttcgtcccggtaatttctactaagtgtagatttttttnnnnnnnnnnaagcttggcgtggatccgatatcaactagatcttgagacaaatggcagtattcatccacaattttaaaagaaaaggggggattggggggtacagtgcaggggaaagaatagtagacataatagcaacagacatacaaactaaag

SEQ ID NO: 21204 - DNA, 301 bp, Artificial Sequence
  NTC.6_NTC.31
  crRNA array
  misc_feature (148)..(157): n is a, c, g, or t
cttggctttatatatcttgtggaaaggacgaaacaccgtaatttctactaagtgtagatcgaatcgcgcctacgggaattaatttctactaagtgtagatgccgaccgcgtgattgtaggtaatttctactaagtgtagatttttttnnnnnnnnnnaagcttggcgtggatccgatatcaactagatcttgagacaaatggcagtattcatccacaattttaaaagaaaaggggggattggggggtacagtgcaggggaaagaatagtagacataatagcaacagacatacaaactaaag

SEQ ID NO: 21205 - DNA, 301 bp, Artificial Sequence
  NTC.6_NTC.51
  crRNA array
  misc_feature (148)..(157): n is a, c, g, or t
cttggctttatatatcttgtggaaaggacgaaacaccgtaatttctactaagtgtagatcgaatcgcgcctacgggaattaatttctactaagtgtagattaacgcgcaacacgccaatgtaatttctactaagtgtagatttttttnnnnnnnnnnaagcttggcgtggatccgatatcaactagatcttgagacaaatggcagtattcatccacaattttaaaagaaaaggggggattggggggtacagtgcaggggaaagaatagtagacataatagcaacagacatacaaactaaag

SEQ ID NO: 21206 - DNA, 301 bp, Artificial Sequence
  NTC.6_NTC.23
  crRNA array
  misc_feature (148)..(157): n is a, c, g, or t
cttggctttatatatcttgtggaaaggacgaaacaccgtaatttctactaagtgtagatcgaatcgcgcctacgggaattaatttctactaagtgtagatacgcgctattatcgtaggtgtaatttctactaagtgtagatttttttnnnnnnnnnnaagcttggcgtggatccgatatcaactagatcttgagacaaatggcagtattcatccacaattttaaaagaaaaggggggattggggggtacagtgcaggggaaagaatagtagacataatagcaacagacatacaaactaaag

SEQ ID NO: 21207 - DNA, 301 bp, Artificial Sequence
  NTC.6_NTC.36
  crRNA array
  misc_feature (148)..(157): n is a, c, g, or t
cttggctttatatatcttgtggaaaggacgaaacaccgtaatttctactaagtgtagatcgaatcgcgcctacgggaattaatttctactaagtgtagatcaacccgccgtagcgggccttaatttctactaagtgtagatttttttnnnnnnnnnnaagcttggcgtggatccgatatcaactagatcttgagacaaatggcagtattcatccacaattttaaaagaaaaggggggattggggggtacagtgcaggggaaagaatagtagacataatagcaacagacatacaaactaaag

SEQ ID NO: 21208 - DNA, 301 bp, Artificial Sequence
  NTC.6_NTC.15
  crRNA array
  misc_feature (148)..(157): n is a, c, g, or t
cttggctttatatatcttgtggaaaggacgaaacaccgtaatttctactaagtgtagatcgaatcgcgcctacgggaattaatttctactaagtgtagatgttgtcgtgccgcgaatttataatttctactaagtgtagatttttttnnnnnnnnnnaagcttggcgtggatccgatatcaactagatcttgagacaaatggcagtattcatccacaattttaaaagaaaaggggggattggggggtacagtgcaggggaaagaatagtagacataatagcaacagacatacaaactaaag

SEQ ID NO: 21209 - DNA, 301 bp, Artificial Sequence
  NTC.6_NTC.45
  crRNA array
  misc_feature (148)..(157): n is a, c, g, or t
cttggctttatatatcttgtggaaaggacgaaacaccgtaatttctactaagtgtagatcgaatcgcgcctacgggaattaatttctactaagtgtagatcggaacgcgtgatactagggtaatttctactaagtgtagatttttttnnnnnnnnnnaagcttggcgtggatccgatatcaactagatcttgagacaaatggcagtattcatccacaattttaaaagaaaaggggggattggggggtacagtgcaggggaaagaatagtagacataatagcaacagacatacaaactaaag

SEQ ID NO: 21210 - DNA, 301 bp, Artificial Sequence
  NTC.6_NTC.12
  crRNA array
  misc_feature (148)..(157): n is a, c, g, or t
cttggctttatatatcttgtggaaaggacgaaacaccgtaatttctactaagtgtagatcgaatcgcgcctacgggaattaatttctactaagtgtagatcgccgacgattaatcaatagtaatttctactaagtgtagatttttttnnnnnnnnnnaagcttggcgtggatccgatatcaactagatcttgagacaaatggcagtattcatccacaattttaaaagaaaaggggggattggggggtacagtgcaggggaaagaatagtagacataatagcaacagacatacaaactaaag

SEQ ID NO: 21211 - DNA, 301 bp, Artificial Sequence
  NTC.6_NTC.19
  crRNA array
  misc_feature (148)..(157): n is a, c, g, or t
cttggctttatatatcttgtggaaaggacgaaacaccgtaatttctactaagtgtagatcgaatcgcgcctacgggaattaatttctactaagtgtagatcgtcgtagaacgatacccgataatttctactaagtgtagatttttttnnnnnnnnnnaagcttggcgtggatccgatatcaactagatcttgagacaaatggcagtattcatccacaattttaaaagaaaaggggggattggggggtacagtgcaggggaaagaatagtagacataatagcaacagacatacaaactaaag

SEQ ID NO: 21212 - DNA, 301 bp, Artificial Sequence
  NTC.6_NTC.20
  crRNA array
  misc_feature (148)..(157): n is a, c, g, or t
cttggctttatatatcttgtggaaaggacgaaacaccgtaatttctactaagtgtagatcgaatcgcgcctacgggaattaatttctactaagtgtagatattccggcgcgaccagaagataatttctactaagtgtagatttttttnnnnnnnnnnaagcttggcgtggatccgatatcaactagatcttgagacaaatggcagtattcatccacaattttaaaagaaaaggggggattggggggtacagtgcaggggaaagaatagtagacataatagcaacagacatacaaactaaag

SEQ ID NO: 21213 - DNA, 301 bp, Artificial Sequence
  NTC.6_NTC.48
  crRNA array
  misc_feature (148)..(157): n is a, c, g, or t
cttggctttatatatcttgtggaaaggacgaaacaccgtaatttctactaagtgtagatcgaatcgcgcctacgggaattaatttctactaagtgtagatcggtcgactacggctgttagtaatttctactaagtgtagatttttttnnnnnnnnnnaagcttggcgtggatccgatatcaactagatcttgagacaaatggcagtattcatccacaattttaaaagaaaaggggggattggggggtacagtgcaggggaaagaatagtagacataatagcaacagacatacaaactaaag

SEQ ID NO: 21214 - DNA, 301 bp, Artificial Sequence
  NTC.6_NTC.26
  crRNA array
  misc_feature (148)..(157): n is a, c, g, or t
cttggctttatatatcttgtggaaaggacgaaacaccgtaatttctactaagtgtagatcgaatcgcgcctacgggaattaatttctactaagtgtagatcgcgacggcggttttaacactaatttctactaagtgtagatttttttnnnnnnnnnnaagcttggcgtggatccgatatcaactagatcttgagacaaatggcagtattcatccacaattttaaaagaaaaggggggattggggggtacagtgcaggggaaagaatagtagacataatagcaacagacatacaaactaaag

SEQ ID NO: 21215 - DNA, 301 bp, Artificial Sequence
  NTC.6_NTC.27
  crRNA array
  misc_feature (148)..(157): n is a, c, g, or t
cttggctttatatatcttgtggaaaggacgaaacaccgtaatttctactaagtgtagatcgaatcgcgcctacgggaattaatttctactaagtgtagatgtcgcgttgcgaccggcgcttaatttctactaagtgtagatttttttnnnnnnnnnnaagcttggcgtggatccgatatcaactagatcttgagacaaatggcagtattcatccacaattttaaaagaaaaggggggattggggggtacagtgcaggggaaagaatagtagacataatagcaacagacatacaaactaaag

SEQ ID NO: 21216 - DNA, 301 bp, Artificial Sequence
  NTC.6_NTC.34
  crRNA array
  misc_feature (148)..(157): n is a, c, g, or t
cttggctttatatatcttgtggaaaggacgaaacaccgtaatttctactaagtgtagatcgaatcgcgcctacgggaattaatttctactaagtgtagattagcgttcgacacgtgaaactaatttctactaagtgtagatttttttnnnnnnnnnnaagcttggcgtggatccgatatcaactagatcttgagacaaatggcagtattcatccacaattttaaaagaaaaggggggattggggggtacagtgcaggggaaagaatagtagacataatagcaacagacatacaaactaaag

SEQ ID NO: 21217 - DNA, 301 bp, Artificial Sequence
  NTC.6_NTC.16
  crRNA array
  misc_feature (148)..(157): n is a, c, g, or t
cttggctttatatatcttgtggaaaggacgaaacaccgtaatttctactaagtgtagatcgaatcgcgcctacgggaattaatttctactaagtgtagatcggtacgttagacgaaaatttaatttctactaagtgtagatttttttnnnnnnnnnnaagcttggcgtggatccgatatcaactagatcttgagacaaatggcagtattcatccacaattttaaaagaaaaggggggattggggggtacagtgcaggggaaagaatagtagacataatagcaacagacatacaaactaaag

SEQ ID NO: 21218 - DNA, 301 bp, Artificial Sequence
  NTC.6_NTC.4
  crRNA array
  misc_feature (148)..(157): n is a, c, g, or t
cttggctttatatatcttgtggaaaggacgaaacaccgtaatttctactaagtgtagatcgaatcgcgcctacgggaattaatttctactaagtgtagatatacccgtcgcgaacgtgagtaatttctactaagtgtagatttttttnnnnnnnnnnaagcttggcgtggatccgatatcaactagatcttgagacaaatggcagtattcatccacaattttaaaagaaaaggggggattggggggtacagtgcaggggaaagaatagtagacataatagcaacagacatacaaactaaag

SEQ ID NO: 21219 - DNA, 301 bp, Artificial Sequence
  NTC.6_NTC.42
  crRNA array
  misc_feature (148)..(157): n is a, c, g, or t
cttggctttatatatcttgtggaaaggacgaaacaccgtaatttctactaagtgtagatcgaatcgcgcctacgggaattaatttctactaagtgtagatggtcaaatcgcggcgataactaatttctactaagtgtagatttttttnnnnnnnnnnaagcttggcgtggatccgatatcaactagatcttgagacaaatggcagtattcatccacaattttaaaagaaaaggggggattggggggtacagtgcaggggaaagaatagtagacataatagcaacagacatacaaactaaag

SEQ ID NO: 21220 - DNA, 301 bp, Artificial Sequence
  NTC.6_NTC.22
  crRNA array
  misc_feature (148)..(157): n is a, c, g, or t
cttggctttatatatcttgtggaaaggacgaaacaccgtaatttctactaagtgtagatcgaatcgcgcctacgggaattaatttctactaagtgtagatgcgcgtcaacgtaatgtgcctaatttctactaagtgtagatttttttnnnnnnnnnnaagcttggcgtggatccgatatcaactagatcttgagacaaatggcagtattcatccacaattttaaaagaaaaggggggattggggggtacagtgcaggggaaagaatagtagacataatagcaacagacatacaaactaaag

SEQ ID NO: 21221 - DNA, 301 bp, Artificial Sequence
  NTC.6_NTC.17
  crRNA array
  misc_feature (148)..(157): n is a, c, g, or t
cttggctttatatatcttgtggaaaggacgaaacaccgtaatttctactaagtgtagatcgaatcgcgcctacgggaattaatttctactaagtgtagattatcgaacgctatcgaacgttaatttctactaagtgtagatttttttnnnnnnnnnnaagcttggcgtggatccgatatcaactagatcttgagacaaatggcagtattcatccacaattttaaaagaaaaggggggattggggggtacagtgcaggggaaagaatagtagacataatagcaacagacatacaaactaaag

SEQ ID NO: 21222 - DNA, 301 bp, Artificial Sequence
  NTC.6_NTC.9
  crRNA array
  misc_feature (148)..(157): n is a, c, g, or t
cttggctttatatatcttgtggaaaggacgaaacaccgtaatttctactaagtgtagatcgaatcgcgcctacgggaattaatttctactaagtgtagatatcgccgtacggctatggcataatttctactaagtgtagatttttttnnnnnnnnnnaagcttggcgtggatccgatatcaactagatcttgagacaaatggcagtattcatccacaattttaaaagaaaaggggggattggggggtacagtgcaggggaaagaatagtagacataatagcaacagacatacaaactaaag

SEQ ID NO: 21223 - DNA, 301 bp, Artificial Sequence
  NTC.6_NTC.30
  crRNA array
  misc_feature (148)..(157): n is a, c, g, or t
cttggctttatatatcttgtggaaaggacgaaacaccgtaatttctactaagtgtagatcgaatcgcgcctacgggaattaatttctactaagtgtagatcgatcgtacgggtgtcctaataatttctactaagtgtagatttttttnnnnnnnnnnaagcttggcgtggatccgatatcaactagatcttgagacaaatggcagtattcatccacaattttaaaagaaaaggggggattggggggtacagtgcaggggaaagaatagtagacataatagcaacagacatacaaactaaag

SEQ ID NO: 21224 - DNA, 301 bp, Artificial Sequence
  NTC.6_NTC.8
  crRNA array
  misc_feature (148)..(157): n is a, c, g, or t
cttggctttatatatcttgtggaaaggacgaaacaccgtaatttctactaagtgtagatcgaatcgcgcctacgggaattaatttctactaagtgtagatcgaccgaggttacgctgggataatttctactaagtgtagatttttttnnnnnnnnnnaagcttggcgtggatccgatatcaactagatcttgagacaaatggcagtattcatccacaattttaaaagaaaaggggggattggggggtacagtgcaggggaaagaatagtagacataatagcaacagacatacaaactaaag

SEQ ID NO: 21225 - DNA, 301 bp, Artificial Sequence
  NTC.6_NTC.46
  crRNA array
  misc_feature (148)..(157): n is a, c, g, or t
cttggctttatatatcttgtggaaaggacgaaacaccgtaatttctactaagtgtagatcgaatcgcgcctacgggaattaatttctactaagtgtagatagcgggtcgtagacgcgcggtaatttctactaagtgtagatttttttnnnnnnnnnnaagcttggcgtggatccgatatcaactagatcttgagacaaatggcagtattcatccacaattttaaaagaaaaggggggattggggggtacagtgcaggggaaagaatagtagacataatagcaacagacatacaaactaaag

SEQ ID NO: 21226 - DNA, 301 bp, Artificial Sequence
  NTC.6_NTC.35
  crRNA array
  misc_feature (148)..(157): n is a, c, g, or t
cttggctttatatatcttgtggaaaggacgaaacaccgtaatttctactaagtgtagatcgaatcgcgcctacgggaattaatttctactaagtgtagattggcgcgtaatcgctattcgtaatttctactaagtgtagatttttttnnnnnnnnnnaagcttggcgtggatccgatatcaactagatcttgagacaaatggcagtattcatccacaattttaaaagaaaaggggggattggggggtacagtgcaggggaaagaatagtagacataatagcaacagacatacaaactaaag

SEQ ID NO: 21227 - DNA, 301 bp, Artificial Sequence
  NTC.6_NTC.10
  crRNA array
  misc_feature (148)..(157): n is a, c, g, or t
cttggctttatatatcttgtggaaaggacgaaacaccgtaatttctactaagtgtagatcgaatcgcgcctacgggaattaatttctactaagtgtagatcgctaagttcgcgcgggccgtaatttctactaagtgtagatttttttnnnnnnnnnnaagcttggcgtggatccgatatcaactagatcttgagacaaatggcagtattcatccacaattttaaaagaaaaggggggattggggggtacagtgcaggggaaagaatagtagacataatagcaacagacatacaaactaaag

SEQ ID NO: 21228 - DNA, 301 bp, Artificial Sequence
  NTC.6_NTC.11
  crRNA array
  misc_feature (148)..(157): n is a, c, g, or t
cttggctttatatatcttgtggaaaggacgaaacaccgtaatttctactaagtgtagatcgaatcgcgcctacgggaattaatttctactaagtgtagatcgttcgtcgacgaagcaatctaatttctactaagtgtagatttttttnnnnnnnnnnaagcttggcgtggatccgatatcaactagatcttgagacaaatggcagtattcatccacaattttaaaagaaaaggggggattggggggtacagtgcaggggaaagaatagtagacataatagcaacagacatacaaactaaag

SEQ ID NO: 21229 - DNA, 301 bp, Artificial Sequence
  NTC.6_NTC.14
  crRNA array
  misc_feature (148)..(157): n is a, c, g, or t
cttggctttatatatcttgtggaaaggacgaaacaccgtaatttctactaagtgtagatcgaatcgcgcctacgggaattaatttctactaagtgtagatccgttcgtgcgatagtgttttaatttctactaagtgtagatttttttnnnnnnnnnnaagcttggcgtggatccgatatcaactagatcttgagacaaatggcagtattcatccacaattttaaaagaaaaggggggattggggggtacagtgcaggggaaagaatagtagacataatagcaacagacatacaaactaaag

SEQ ID NO: 21230 - DNA, 301 bp, Artificial Sequence
  NTC.6_NTC.28
  crRNA array
  misc_feature (148)..(157): n is a, c, g, or t
cttggctttatatatcttgtggaaaggacgaaacaccgtaatttctactaagtgtagatcgaatcgcgcctacgggaattaatttctactaagtgtagataccgctaatcggcgtaaacttaatttctactaagtgtagatttttttnnnnnnnnnnaagcttggcgtggatccgatatcaactagatcttgagacaaatggcagtattcatccacaattttaaaagaaaaggggggattggggggtacagtgcaggggaaagaatagtagacataatagcaacagacatacaaactaaag

SEQ ID NO: 21231 - DNA, 301 bp, Artificial Sequence
  NTC.38_NTC.41
  crRNA array
  misc_feature (148)..(157): n is a, c, g, or t
cttggctttatatatcttgtggaaaggacgaaacaccgtaatttctactaagtgtagataacggagcgcgatactaccataatttctactaagtgtagatttgatggcgcgacgcgttattaatttctactaagtgtagatttttttnnnnnnnnnnaagcttggcgtggatccgatatcaactagatcttgagacaaatggcagtattcatccacaattttaaaagaaaaggggggattggggggtacagtgcaggggaaagaatagtagacataatagcaacagacatacaaactaaag

SEQ ID NO: 21232 - DNA, 301 bp, Artificial Sequence
  NTC.38_NTC.18
  crRNA array
  misc_feature (148)..(157): n is a, c, g, or t
cttggctttatatatcttgtggaaaggacgaaacaccgtaatttctactaagtgtagataacggagcgcgatactaccataatttctactaagtgtagattccggttacgaccggcaaaataatttctactaagtgtagatttttttnnnnnnnnnnaagcttggcgtggatccgatatcaactagatcttgagacaaatggcagtattcatccacaattttaaaagaaaaggggggattggggggtacagtgcaggggaaagaatagtagacataatagcaacagacatacaaactaaag

SEQ ID NO: 21233 - DNA, 301 bp, Artificial Sequence
  NTC.38_NTC.24
  crRNA array
  misc_feature (148)..(157): n is a, c, g, or t
cttggctttatatatcttgtggaaaggacgaaacaccgtaatttctactaagtgtagataacggagcgcgatactaccataatttctactaagtgtagatactatcgacgttcgtcccggtaatttctactaagtgtagatttttttnnnnnnnnnnaagcttggcgtggatccgatatcaactagatcttgagacaaatggcagtattcatccacaattttaaaagaaaaggggggattggggggtacagtgcaggggaaagaatagtagacataatagcaacagacatacaaactaaag

SEQ ID NO: 21234 - DNA, 301 bp, Artificial Sequence
  NTC.38_NTC.31
  crRNA array
  misc_feature (148)..(157): n is a, c, g, or t
cttggctttatatatcttgtggaaaggacgaaacaccgtaatttctactaagtgtagataacggagcgcgatactaccataatttctactaagtgtagatgccgaccgcgtgattgtaggtaatttctactaagtgtagatttttttnnnnnnnnnnaagcttggcgtggatccgatatcaactagatcttgagacaaatggcagtattcatccacaattttaaaagaaaaggggggattggggggtacagtgcaggggaaagaatagtagacataatagcaacagacatacaaactaaag

SEQ ID NO: 21235 - DNA, 301 bp, Artificial Sequence
  NTC.38_NTC.51
  crRNA array
  misc_feature (148)..(157): n is a, c, g, or t
cttggctttatatatcttgtggaaaggacgaaacaccgtaatttctactaagtgtagataacggagcgcgatactaccataatttctactaagtgtagattaacgcgcaacacgccaatgtaatttctactaagtgtagatttttttnnnnnnnnnnaagcttggcgtggatccgatatcaactagatcttgagacaaatggcagtattcatccacaattttaaaagaaaaggggggattggggggtacagtgcaggggaaagaatagtagacataatagcaacagacatacaaactaaag

SEQ ID NO: 21236 - DNA, 301 bp, Artificial Sequence
  NTC.38_NTC.23
  crRNA array
  misc_feature (148)..(157): n is a, c, g, or t
cttggctttatatatcttgtggaaaggacgaaacaccgtaatttctactaagtgtagataacggagcgcgatactaccataatttctactaagtgtagatacgcgctattatcgtaggtgtaatttctactaagtgtagatttttttnnnnnnnnnnaagcttggcgtggatccgatatcaactagatcttgagacaaatggcagtattcatccacaattttaaaagaaaaggggggattggggggtacagtgcaggggaaagaatagtagacataatagcaacagacatacaaactaaag

SEQ ID NO: 21237 - DNA, 301 bp, Artificial Sequence
  NTC.38_NTC.36
  crRNA array
  misc_feature (148)..(157): n is a, c, g, or t
cttggctttatatatcttgtggaaaggacgaaacaccgtaatttctactaagtgtagataacggagcgcgatactaccataatttctactaagtgtagatcaacccgccgtagcgggccttaatttctactaagtgtagatttttttnnnnnnnnnnaagcttggcgtggatccgatatcaactagatcttgagacaaatggcagtattcatccacaattttaaaagaaaaggggggattggggggtacagtgcaggggaaagaatagtagacataatagcaacagacatacaaactaaag

SEQ ID NO: 21238 - DNA, 301 bp, Artificial Sequence
  NTC.38_NTC.15
  crRNA array
  misc_feature (148)..(157): n is a, c, g, or t
cttggctttatatatcttgtggaaaggacgaaacaccgtaatttctactaagtgtagataacggagcgcgatactaccataatttctactaagtgtagatgttgtcgtgccgcgaatttataatttctactaagtgtagatttttttnnnnnnnnnnaagcttggcgtggatccgatatcaactagatcttgagacaaatggcagtattcatccacaattttaaaagaaaaggggggattggggggtacagtgcaggggaaagaatagtagacataatagcaacagacatacaaactaaag

SEQ ID NO: 21239 - DNA, 301 bp, Artificial Sequence
  NTC.38_NTC.45
  crRNA array
  misc_feature (148)..(157): n is a, c, g, or t
cttggctttatatatcttgtggaaaggacgaaacaccgtaatttctactaagtgtagataacggagcgcgatactaccataatttctactaagtgtagatcggaacgcgtgatactagggtaatttctactaagtgtagatttttttnnnnnnnnnnaagcttggcgtggatccgatatcaactagatcttgagacaaatggcagtattcatccacaattttaaaagaaaaggggggattggggggtacagtgcaggggaaagaatagtagacataatagcaacagacatacaaactaaag

SEQ ID NO: 21240 - DNA, 301 bp, Artificial Sequence
  NTC.38_NTC.12
  crRNA array
  misc_feature (148)..(157): n is a, c, g, or t
cttggctttatatatcttgtggaaaggacgaaacaccgtaatttctactaagtgtagataacggagcgcgatactaccataatttctactaagtgtagatcgccgacgattaatcaatagtaatttctactaagtgtagatttttttnnnnnnnnnnaagcttggcgtggatccgatatcaactagatcttgagacaaatggcagtattcatccacaattttaaaagaaaaggggggattggggggtacagtgcaggggaaagaatagtagacataatagcaacagacatacaaactaaag

SEQ ID NO: 21241 - DNA, 301 bp, Artificial Sequence
  NTC.38_NTC.19
  crRNA array
  misc_feature (148)..(157): n is a, c, g, or t
cttggctttatatatcttgtggaaaggacgaaacaccgtaatttctactaagtgtagataacggagcgcgatactaccataatttctactaagtgtagatcgtcgtagaacgatacccgataatttctactaagtgtagatttttttnnnnnnnnnnaagcttggcgtggatccgatatcaactagatcttgagacaaatggcagtattcatccacaattttaaaagaaaaggggggattggggggtacagtgcaggggaaagaatagtagacataatagcaacagacatacaaactaaag

SEQ ID NO: 21242 - DNA, 301 bp, Artificial Sequence
  NTC.38_NTC.20
  crRNA array
  misc_feature (148)..(157): n is a, c, g, or t
cttggctttatatatcttgtggaaaggacgaaacaccgtaatttctactaagtgtagataacggagcgcgatactaccataatttctactaagtgtagatattccggcgcgaccagaagataatttctactaagtgtagatttttttnnnnnnnnnnaagcttggcgtggatccgatatcaactagatcttgagacaaatggcagtattcatccacaattttaaaagaaaaggggggattggggggtacagtgcaggggaaagaatagtagacataatagcaacagacatacaaactaaag

SEQ ID NO: 21243 - DNA, 301 bp, Artificial Sequence
  NTC.38_NTC.48
  crRNA array
  misc_feature (148)..(157): n is a, c, g, or t
cttggctttatatatcttgtggaaaggacgaaacaccgtaatttctactaagtgtagataacggagcgcgatactaccataatttctactaagtgtagatcggtcgactacggctgttagtaatttctactaagtgtagatttttttnnnnnnnnnnaagcttggcgtggatccgatatcaactagatcttgagacaaatggcagtattcatccacaattttaaaagaaaaggggggattggggggtacagtgcaggggaaagaatagtagacataatagcaacagacatacaaactaaag

SEQ ID NO: 21244 - DNA, 301 bp, Artificial Sequence
  NTC.38_NTC.26
  crRNA array
  misc_feature (148)..(157): n is a, c, g, or t
cttggctttatatatcttgtggaaaggacgaaacaccgtaatttctactaagtgtagataacggagcgcgatactaccataatttctactaagtgtagatcgcgacggcggttttaacactaatttctactaagtgtagatttttttnnnnnnnnnnaagcttggcgtggatccgatatcaactagatcttgagacaaatggcagtattcatccacaattttaaaagaaaaggggggattggggggtacagtgcaggggaaagaatagtagacataatagcaacagacatacaaactaaag

SEQ ID NO: 21245 - DNA, 301 bp, Artificial Sequence
  NTC.38_NTC.27
  crRNA array
  misc_feature (148)..(157): n is a, c, g, or t
cttggctttatatatcttgtggaaaggacgaaacaccgtaatttctactaagtgtagataacggagcgcgatactaccataatttctactaagtgtagatgtcgcgttgcgaccggcgcttaatttctactaagtgtagatttttttnnnnnnnnnnaagcttggcgtggatccgatatcaactagatcttgagacaaatggcagtattcatccacaattttaaaagaaaaggggggattggggggtacagtgcaggggaaagaatagtagacataatagcaacagacatacaaactaaag

SEQ ID NO: 21246 - DNA, 301 bp, Artificial Sequence
  NTC.38_NTC.34
  crRNA array
  misc_feature (148)..(157): n is a, c, g, or t
cttggctttatatatcttgtggaaaggacgaaacaccgtaatttctactaagtgtagataacggagcgcgatactaccataatttctactaagtgtagattagcgttcgacacgtgaaactaatttctactaagtgtagatttttttnnnnnnnnnnaagcttggcgtggatccgatatcaactagatcttgagacaaatggcagtattcatccacaattttaaaagaaaaggggggattggggggtacagtgcaggggaaagaatagtagacataatagcaacagacatacaaactaaag

SEQ ID NO: 21247 - DNA, 301 bp, Artificial Sequence
  NTC.38_NTC.16
  crRNA array
  misc_feature (148)..(157): n is a, c, g, or t
cttggctttatatatcttgtggaaaggacgaaacaccgtaatttctactaagtgtagataacggagcgcgatactaccataatttctactaagtgtagatcggtacgttagacgaaaatttaatttctactaagtgtagatttttttnnnnnnnnnnaagcttggcgtggatccgatatcaactagatcttgagacaaatggcagtattcatccacaattttaaaagaaaaggggggattggggggtacagtgcaggggaaagaatagtagacataatagcaacagacatacaaactaaag

SEQ ID NO: 21248 - DNA, 301 bp, Artificial Sequence
  NTC.38_NTC.4
  crRNA array
  misc_feature (148)..(157): n is a, c, g, or t
cttggctttatatatcttgtggaaaggacgaaacaccgtaatttctactaagtgtagataacggagcgcgatactaccataatttctactaagtgtagatatacccgtcgcgaacgtgagtaatttctactaagtgtagatttttttnnnnnnnnnnaagcttggcgtggatccgatatcaactagatcttgagacaaatggcagtattcatccacaattttaaaagaaaaggggggattggggggtacagtgcaggggaaagaatagtagacataatagcaacagacatacaaactaaag

SEQ ID NO: 21249 - DNA, 301 bp, Artificial Sequence
  NTC.38_NTC.42
  crRNA array
  misc_feature (148)..(157): n is a, c, g, or t
cttggctttatatatcttgtggaaaggacgaaacaccgtaatttctactaagtgtagataacggagcgcgatactaccataatttctactaagtgtagatggtcaaatcgcggcgataactaatttctactaagtgtagatttttttnnnnnnnnnnaagcttggcgtggatccgatatcaactagatcttgagacaaatggcagtattcatccacaattttaaaagaaaaggggggattggggggtacagtgcaggggaaagaatagtagacataatagcaacagacatacaaactaaag

SEQ ID NO: 21250 - DNA, 301 bp, Artificial Sequence
  NTC.38_NTC.22
  crRNA array
  misc_feature (148)..(157): n is a, c, g, or t
cttggctttatatatcttgtggaaaggacgaaacaccgtaatttctactaagtgtagataacggagcgcgatactaccataatttctactaagtgtagatgcgcgtcaacgtaatgtgcctaatttctactaagtgtagatttttttnnnnnnnnnnaagcttggcgtggatccgatatcaactagatcttgagacaaatggcagtattcatccacaattttaaaagaaaaggggggattggggggtacagtgcaggggaaagaatagtagacataatagcaacagacatacaaactaaag

SEQ ID NO: 21251 - DNA, 301 bp, Artificial Sequence
  NTC.38_NTC.17
  crRNA array
  misc_feature (148)..(157): n is a, c, g, or t
cttggctttatatatcttgtggaaaggacgaaacaccgtaatttctactaagtgtagataacggagcgcgatactaccataatttctactaagtgtagattatcgaacgctatcgaacgttaatttctactaagtgtagatttttttnnnnnnnnnnaagcttggcgtggatccgatatcaactagatcttgagacaaatggcagtattcatccacaattttaaaagaaaaggggggattggggggtacagtgcaggggaaagaatagtagacataatagcaacagacatacaaactaaag

SEQ ID NO: 21252 - DNA, 301 bp, Artificial Sequence
  NTC.38_NTC.9
  crRNA array
  misc_feature (148)..(157): n is a, c, g, or t
cttggctttatatatcttgtggaaaggacgaaacaccgtaatttctactaagtgtagataacggagcgcgatactaccataatttctactaagtgtagatatcgccgtacggctatggcataatttctactaagtgtagatttttttnnnnnnnnnnaagcttggcgtggatccgatatcaactagatcttgagacaaatggcagtattcatccacaattttaaaagaaaaggggggattggggggtacagtgcaggggaaagaatagtagacataatagcaacagacatacaaactaaag

SEQ ID NO: 21253 - DNA, 301 bp, Artificial Sequence
  NTC.38_NTC.30
  crRNA array
  misc_feature (148)..(157): n is a, c, g, or t
cttggctttatatatcttgtggaaaggacgaaacaccgtaatttctactaagtgtagataacggagcgcgatactaccataatttctactaagtgtagatcgatcgtacgggtgtcctaataatttctactaagtgtagatttttttnnnnnnnnnnaagcttggcgtggatccgatatcaactagatcttgagacaaatggcagtattcatccacaattttaaaagaaaaggggggattggggggtacagtgcaggggaaagaatagtagacataatagcaacagacatacaaactaaag

SEQ ID NO: 21254 - DNA, 301 bp, Artificial Sequence
  NTC.38_NTC.8
  crRNA array
  misc_feature (148)..(157): n is a, c, g, or t
cttggctttatatatcttgtggaaaggacgaaacaccgtaatttctactaagtgtagataacggagcgcgatactaccataatttctactaagtgtagatcgaccgaggttacgctgggataatttctactaagtgtagatttttttnnnnnnnnnnaagcttggcgtggatccgatatcaactagatcttgagacaaatggcagtattcatccacaattttaaaagaaaaggggggattggggggtacagtgcaggggaaagaatagtagacataatagcaacagacatacaaactaaag

SEQ ID NO: 21255 - DNA, 301 bp, Artificial Sequence
  NTC.38_NTC.46
  crRNA array
  misc_feature (148)..(157): n is a, c, g, or t
cttggctttatatatcttgtggaaaggacgaaacaccgtaatttctactaagtgtagataacggagcgcgatactaccataatttctactaagtgtagatagcgggtcgtagacgcgcggtaatttctactaagtgtagatttttttnnnnnnnnnnaagcttggcgtggatccgatatcaactagatcttgagacaaatggcagtattcatccacaattttaaaagaaaaggggggattggggggtacagtgcaggggaaagaatagtagacataatagcaacagacatacaaactaaag

SEQ ID NO: 21256 - DNA, 301 bp, Artificial Sequence
  NTC.38_NTC.35
  crRNA array
  misc_feature (148)..(157): n is a, c, g, or t
cttggctttatatatcttgtggaaaggacgaaacaccgtaatttctactaagtgtagataacggagcgcgatactaccataatttctactaagtgtagattggcgcgtaatcgctattcgtaatttctactaagtgtagatttttttnnnnnnnnnnaagcttggcgtggatccgatatcaactagatcttgagacaaatggcagtattcatccacaattttaaaagaaaaggggggattggggggtacagtgcaggggaaagaatagtagacataatagcaacagacatacaaactaaag

SEQ ID NO: 21257 - DNA, 301 bp, Artificial Sequence
  NTC.38_NTC.10
  crRNA array
  misc_feature (148)..(157): n is a, c, g, or t
cttggctttatatatcttgtggaaaggacgaaacaccgtaatttctactaagtgtagataacggagcgcgatactaccataatttctactaagtgtagatcgctaagttcgcgcgggccgtaatttctactaagtgtagatttttttnnnnnnnnnnaagcttggcgtggatccgatatcaactagatcttgagacaaatggcagtattcatccacaattttaaaagaaaaggggggattggggggtacagtgcaggggaaagaatagtagacataatagcaacagacatacaaactaaag

SEQ ID NO: 21258 - DNA, 301 bp, Artificial Sequence
  NTC.38_NTC.11
  crRNA array
  misc_feature (148)..(157): n is a, c, g, or t
cttggctttatatatcttgtggaaaggacgaaacaccgtaatttctactaagtgtagataacggagcgcgatactaccataatttctactaagtgtagatcgttcgtcgacgaagcaatctaatttctactaagtgtagatttttttnnnnnnnnnnaagcttggcgtggatccgatatcaactagatcttgagacaaatggcagtattcatccacaattttaaaagaaaaggggggattggggggtacagtgcaggggaaagaatagtagacataatagcaacagacatacaaactaaag

SEQ ID NO: 21259 - DNA, 301 bp, Artificial Sequence
  NTC.38_NTC.14
  crRNA array
  misc_feature (148)..(157): n is a, c, g, or t
cttggctttatatatcttgtggaaaggacgaaacaccgtaatttctactaagtgtagataacggagcgcgatactaccataatttctactaagtgtagatccgttcgtgcgatagtgttttaatttctactaagtgtagatttttttnnnnnnnnnnaagcttggcgtggatccgatatcaactagatcttgagacaaatggcagtattcatccacaattttaaaagaaaaggggggattggggggtacagtgcaggggaaagaatagtagacataatagcaacagacatacaaactaaag

SEQ ID NO: 21260 - DNA, 301 bp, Artificial Sequence
  NTC.38_NTC.28
  crRNA array
  misc_feature (148)..(157): n is a, c, g, or t
cttggctttatatatcttgtggaaaggacgaaacaccgtaatttctactaagtgtagataacggagcgcgatactaccataatttctactaagtgtagataccgctaatcggcgtaaacttaatttctactaagtgtagatttttttnnnnnnnnnnaagcttggcgtggatccgatatcaactagatcttgagacaaatggcagtattcatccacaattttaaaagaaaaggggggattggggggtacagtgcaggggaaagaatagtagacataatagcaacagacatacaaactaaag

SEQ ID NO: 21261 - DNA, 301 bp, Artificial Sequence
  NTC.41_NTC.18
  crRNA array
  misc_feature (148)..(157): n is a, c, g, or t
cttggctttatatatcttgtggaaaggacgaaacaccgtaatttctactaagtgtagatttgatggcgcgacgcgttattaatttctactaagtgtagattccggttacgaccggcaaaataatttctactaagtgtagatttttttnnnnnnnnnnaagcttggcgtggatccgatatcaactagatcttgagacaaatggcagtattcatccacaattttaaaagaaaaggggggattggggggtacagtgcaggggaaagaatagtagacataatagcaacagacatacaaactaaag

SEQ ID NO: 21262 - DNA, 301 bp, Artificial Sequence
  NTC.41_NTC.24
  crRNA array
  misc_feature (148)..(157): n is a, c, g, or t
cttggctttatatatcttgtggaaaggacgaaacaccgtaatttctactaagtgtagatttgatggcgcgacgcgttattaatttctactaagtgtagatactatcgacgttcgtcccggtaatttctactaagtgtagatttttttnnnnnnnnnnaagcttggcgtggatccgatatcaactagatcttgagacaaatggcagtattcatccacaattttaaaagaaaaggggggattggggggtacagtgcaggggaaagaatagtagacataatagcaacagacatacaaactaaag

SEQ ID NO: 21263 - DNA, 301 bp, Artificial Sequence
  NTC.41_NTC.31
  crRNA array
  misc_feature (148)..(157): n is a, c, g, or t
cttggctttatatatcttgtggaaaggacgaaacaccgtaatttctactaagtgtagatttgatggcgcgacgcgttattaatttctactaagtgtagatgccgaccgcgtgattgtaggtaatttctactaagtgtagatttttttnnnnnnnnnnaagcttggcgtggatccgatatcaactagatcttgagacaaatggcagtattcatccacaattttaaaagaaaaggggggattggggggtacagtgcaggggaaagaatagtagacataatagcaacagacatacaaactaaag

SEQ ID NO: 21264 - DNA, 301 bp, Artificial Sequence
  NTC.41_NTC.51
  crRNA array
  misc_feature (148)..(157): n is a, c, g, or t
cttggctttatatatcttgtggaaaggacgaaacaccgtaatttctactaagtgtagatttgatggcgcgacgcgttattaatttctactaagtgtagattaacgcgcaacacgccaatgtaatttctactaagtgtagatttttttnnnnnnnnnnaagcttggcgtggatccgatatcaactagatcttgagacaaatggcagtattcatccacaattttaaaagaaaaggggggattggggggtacagtgcaggggaaagaatagtagacataatagcaacagacatacaaactaaag

SEQ ID NO: 21265 - DNA, 301 bp, Artificial Sequence
  NTC.41_NTC.23
  crRNA array
  misc_feature (148)..(157): n is a, c, g, or t
cttggctttatatatcttgtggaaaggacgaaacaccgtaatttctactaagtgtagatttgatggcgcgacgcgttattaatttctactaagtgtagatacgcgctattatcgtaggtgtaatttctactaagtgtagatttttttnnnnnnnnnnaagcttggcgtggatccgatatcaactagatcttgagacaaatggcagtattcatccacaattttaaaagaaaaggggggattggggggtacagtgcaggggaaagaatagtagacataatagcaacagacatacaaactaaag

SEQ ID NO: 21266 - DNA, 301 bp, Artificial Sequence
  NTC.41_NTC.36
  crRNA array
  misc_feature (148)..(157): n is a, c, g, or t
cttggctttatatatcttgtggaaaggacgaaacaccgtaatttctactaagtgtagatttgatggcgcgacgcgttattaatttctactaagtgtagatcaacccgccgtagcgggccttaatttctactaagtgtagatttttttnnnnnnnnnnaagcttggcgtggatccgatatcaactagatcttgagacaaatggcagtattcatccacaattttaaaagaaaaggggggattggggggtacagtgcaggggaaagaatagtagacataatagcaacagacatacaaactaaag

SEQ ID NO: 21267 - DNA, 301 bp, Artificial Sequence
  NTC.41_NTC.15
  crRNA array
  misc_feature (148)..(157): n is a, c, g, or t
cttggctttatatatcttgtggaaaggacgaaacaccgtaatttctactaagtgtagatttgatggcgcgacgcgttattaatttctactaagtgtagatgttgtcgtgccgcgaatttataatttctactaagtgtagatttttttnnnnnnnnnnaagcttggcgtggatccgatatcaactagatcttgagacaaatggcagtattcatccacaattttaaaagaaaaggggggattggggggtacagtgcaggggaaagaatagtagacataatagcaacagacatacaaactaaag

SEQ ID NO: 21268 - DNA, 301 bp, Artificial Sequence
  NTC.41_NTC.45
  crRNA array
  misc_feature (148)..(157): n is a, c, g, or t
cttggctttatatatcttgtggaaaggacgaaacaccgtaatttctactaagtgtagatttgatggcgcgacgcgttattaatttctactaagtgtagatcggaacgcgtgatactagggtaatttctactaagtgtagatttttttnnnnnnnnnnaagcttggcgtggatccgatatcaactagatcttgagacaaatggcagtattcatccacaattttaaaagaaaaggggggattggggggtacagtgcaggggaaagaatagtagacataatagcaacagacatacaaactaaag

SEQ ID NO: 21269 - DNA, 301 bp, Artificial Sequence
  NTC.41_NTC.12
  crRNA array
  misc_feature (148)..(157): n is a, c, g, or t
cttggctttatatatcttgtggaaaggacgaaacaccgtaatttctactaagtgtagatttgatggcgcgacgcgttattaatttctactaagtgtagatcgccgacgattaatcaatagtaatttctactaagtgtagatttttttnnnnnnnnnnaagcttggcgtggatccgatatcaactagatcttgagacaaatggcagtattcatccacaattttaaaagaaaaggggggattggggggtacagtgcaggggaaagaatagtagacataatagcaacagacatacaaactaaag

SEQ ID NO: 21270 - DNA, 301 bp, Artificial Sequence
  NTC.41_NTC.19
  crRNA array
  misc_feature (148)..(157): n is a, c, g, or t
cttggctttatatatcttgtggaaaggacgaaacaccgtaatttctactaagtgtagatttgatggcgcgacgcgttattaatttctactaagtgtagatcgtcgtagaacgatacccgataatttctactaagtgtagatttttttnnnnnnnnnnaagcttggcgtggatccgatatcaactagatcttgagacaaatggcagtattcatccacaattttaaaagaaaaggggggattggggggtacagtgcaggggaaagaatagtagacataatagcaacagacatacaaactaaag

SEQ ID NO: 21271 - DNA, 301 bp, Artificial Sequence
  NTC.41_NTC.20
  crRNA array
  misc_feature (148)..(157): n is a, c, g, or t
cttggctttatatatcttgtggaaaggacgaaacaccgtaatttctactaagtgtagatttgatggcgcgacgcgttattaatttctactaagtgtagatattccggcgcgaccagaagataatttctactaagtgtagatttttttnnnnnnnnnnaagcttggcgtggatccgatatcaactagatcttgagacaaatggcagtattcatccacaattttaaaagaaaaggggggattggggggtacagtgcaggggaaagaatagtagacataatagcaacagacatacaaactaaag

SEQ ID NO: 21272 - DNA, 301 bp, Artificial Sequence
  NTC.41_NTC.48
  crRNA array
  misc_feature (148)..(157): n is a, c, g, or t
cttggctttatatatcttgtggaaaggacgaaacaccgtaatttctactaagtgtagatttgatggcgcgacgcgttattaatttctactaagtgtagatcggtcgactacggctgttagtaatttctactaagtgtagatttttttnnnnnnnnnnaagcttggcgtggatccgatatcaactagatcttgagacaaatggcagtattcatccacaattttaaaagaaaaggggggattggggggtacagtgcaggggaaagaatagtagacataatagcaacagacatacaaactaaag

SEQ ID NO: 21273 - DNA, 301 bp, Artificial Sequence
  NTC.41_NTC.26
  crRNA array
  misc_feature (148)..(157): n is a, c, g, or t
cttggctttatatatcttgtggaaaggacgaaacaccgtaatttctactaagtgtagatttgatggcgcgacgcgttattaatttctactaagtgtagatcgcgacggcggttttaacactaatttctactaagtgtagatttttttnnnnnnnnnnaagcttggcgtggatccgatatcaactagatcttgagacaaatggcagtattcatccacaattttaaaagaaaaggggggattggggggtacagtgcaggggaaagaatagtagacataatagcaacagacatacaaactaaag

SEQ ID NO: 21274 - DNA, 301 bp, Artificial Sequence
  NTC.41_NTC.27
  crRNA array
  misc_feature (148)..(157): n is a, c, g, or t
cttggctttatatatcttgtggaaaggacgaaacaccgtaatttctactaagtgtagatttgatggcgcgacgcgttattaatttctactaagtgtagatgtcgcgttgcgaccggcgcttaatttctactaagtgtagatttttttnnnnnnnnnnaagcttggcgtggatccgatatcaactagatcttgagacaaatggcagtattcatccacaattttaaaagaaaaggggggattggggggtacagtgcaggggaaagaatagtagacataatagcaacagacatacaaactaaag

SEQ ID NO: 21275 - DNA, 301 bp, Artificial Sequence
  NTC.41_NTC.34
  crRNA array
  misc_feature (148)..(157): n is a, c, g, or t
cttggctttatatatcttgtggaaaggacgaaacaccgtaatttctactaagtgtagatttgatggcgcgacgcgttattaatttctactaagtgtagattagcgttcgacacgtgaaactaatttctactaagtgtagatttttttnnnnnnnnnnaagcttggcgtggatccgatatcaactagatcttgagacaaatggcagtattcatccacaattttaaaagaaaaggggggattggggggtacagtgcaggggaaagaatagtagacataatagcaacagacatacaaactaaag

SEQ ID NO: 21276 - DNA, 301 bp, Artificial Sequence
  NTC.41_NTC.16
  crRNA array
  misc_feature (148)..(157): n is a, c, g, or t
cttggctttatatatcttgtggaaaggacgaaacaccgtaatttctactaagtgtagatttgatggcgcgacgcgttattaatttctactaagtgtagatcggtacgttagacgaaaatttaatttctactaagtgtagatttttttnnnnnnnnnnaagcttggcgtggatccgatatcaactagatcttgagacaaatggcagtattcatccacaattttaaaagaaaaggggggattggggggtacagtgcaggggaaagaatagtagacataatagcaacagacatacaaactaaag

SEQ ID NO: 21277 - DNA, 301 bp, Artificial Sequence
  NTC.41_NTC.4
  crRNA array
  misc_feature (148)..(157): n is a, c, g, or t
cttggctttatatatcttgtggaaaggacgaaacaccgtaatttctactaagtgtagatttgatggcgcgacgcgttattaatttctactaagtgtagatatacccgtcgcgaacgtgagtaatttctactaagtgtagatttttttnnnnnnnnnnaagcttggcgtggatccgatatcaactagatcttgagacaaatggcagtattcatccacaattttaaaagaaaaggggggattggggggtacagtgcaggggaaagaatagtagacataatagcaacagacatacaaactaaag

SEQ ID NO: 21278 - DNA, 301 bp, Artificial Sequence
  NTC.41_NTC.42
  crRNA array
  misc_feature (148)..(157): n is a, c, g, or t
cttggctttatatatcttgtggaaaggacgaaacaccgtaatttctactaagtgtagatttgatggcgcgacgcgttattaatttctactaagtgtagatggtcaaatcgcggcgataactaatttctactaagtgtagatttttttnnnnnnnnnnaagcttggcgtggatccgatatcaactagatcttgagacaaatggcagtattcatccacaattttaaaagaaaaggggggattggggggtacagtgcaggggaaagaatagtagacataatagcaacagacatacaaactaaag

SEQ ID NO: 21279 - DNA, 301 bp, Artificial Sequence
  NTC.41_NTC.22
  crRNA array
  misc_feature (148)..(157): n is a, c, g, or t
cttggctttatatatcttgtggaaaggacgaaacaccgtaatttctactaagtgtagatttgatggcgcgacgcgttattaatttctactaagtgtagatgcgcgtcaacgtaatgtgcctaatttctactaagtgtagatttttttnnnnnnnnnnaagcttggcgtggatccgatatcaactagatcttgagacaaatggcagtattcatccacaattttaaaagaaaaggggggattggggggtacagtgcaggggaaagaatagtagacataatagcaacagacatacaaactaaag

SEQ ID NO: 21280 - DNA, 301 bp, Artificial Sequence
  NTC.41_NTC.17
  crRNA array
  misc_feature (148)..(157): n is a, c, g, or t
cttggctttatatatcttgtggaaaggacgaaacaccgtaatttctactaagtgtagatttgatggcgcgacgcgttattaatttctactaagtgtagattatcgaacgctatcgaacgttaatttctactaagtgtagatttttttnnnnnnnnnnaagcttggcgtggatccgatatcaactagatcttgagacaaatggcagtattcatccacaattttaaaagaaaaggggggattggggggtacagtgcaggggaaagaatagtagacataatagcaacagacatacaaactaaag

SEQ ID NO: 21281 - DNA, 301 bp, Artificial Sequence
  NTC.41_NTC.9
  crRNA array
  misc_feature (148)..(157): n is a, c, g, or t
cttggctttatatatcttgtggaaaggacgaaacaccgtaatttctactaagtgtagatttgatggcgcgacgcgttattaatttctactaagtgtagatatcgccgtacggctatggcataatttctactaagtgtagatttttttnnnnnnnnnnaagcttggcgtggatccgatatcaactagatcttgagacaaatggcagtattcatccacaattttaaaagaaaaggggggattggggggtacagtgcaggggaaagaatagtagacataatagcaacagacatacaaactaaag

SEQ ID NO: 21282 - DNA, 301 bp, Artificial Sequence
  NTC.41_NTC.30
  crRNA array
  misc_feature (148)..(157): n is a, c, g, or t
cttggctttatatatcttgtggaaaggacgaaacaccgtaatttctactaagtgtagatttgatggcgcgacgcgttattaatttctactaagtgtagatcgatcgtacgggtgtcctaataatttctactaagtgtagatttttttnnnnnnnnnnaagcttggcgtggatccgatatcaactagatcttgagacaaatggcagtattcatccacaattttaaaagaaaaggggggattggggggtacagtgcaggggaaagaatagtagacataatagcaacagacatacaaactaaag

SEQ ID NO: 21283 - DNA, 301 bp, Artificial Sequence
  NTC.41_NTC.8
  crRNA array
  misc_feature (148)..(157): n is a, c, g, or t
cttggctttatatatcttgtggaaaggacgaaacaccgtaatttctactaagtgtagatttgatggcgcgacgcgttattaatttctactaagtgtagatcgaccgaggttacgctgggataatttctactaagtgtagatttttttnnnnnnnnnnaagcttggcgtggatccgatatcaactagatcttgagacaaatggcagtattcatccacaattttaaaagaaaaggggggattggggggtacagtgcaggggaaagaatagtagacataatagcaacagacatacaaactaaag

SEQ ID NO: 21284 - DNA, 301 bp, Artificial Sequence
  NTC.41_NTC.46
  crRNA array
  misc_feature (148)..(157): n is a, c, g, or t
cttggctttatatatcttgtggaaaggacgaaacaccgtaatttctactaagtgtagatttgatggcgcgacgcgttattaatttctactaagtgtagatagcgggtcgtagacgcgcggtaatttctactaagtgtagatttttttnnnnnnnnnnaagcttggcgtggatccgatatcaactagatcttgagacaaatggcagtattcatccacaattttaaaagaaaaggggggattggggggtacagtgcaggggaaagaatagtagacataatagcaacagacatacaaactaaag

SEQ ID NO: 21285 - DNA, 301 bp, Artificial Sequence
  NTC.41_NTC.35
  crRNA array
  misc_feature (148)..(157): n is a, c, g, or t
cttggctttatatatcttgtggaaaggacgaaacaccgtaatttctactaagtgtagatttgatggcgcgacgcgttattaatttctactaagtgtagattggcgcgtaatcgctattcgtaatttctactaagtgtagatttttttnnnnnnnnnnaagcttggcgtggatccgatatcaactagatcttgagacaaatggcagtattcatccacaattttaaaagaaaaggggggattggggggtacagtgcaggggaaagaatagtagacataatagcaacagacatacaaactaaag

SEQ ID NO: 21286 - DNA, 301 bp, Artificial Sequence
  NTC.41_NTC.10
  crRNA array
  misc_feature (148)..(157): n is a, c, g, or t
cttggctttatatatcttgtggaaaggacgaaacaccgtaatttctactaagtgtagatttgatggcgcgacgcgttattaatttctactaagtgtagatcgctaagttcgcgcgggccgtaatttctactaagtgtagatttttttnnnnnnnnnnaagcttggcgtggatccgatatcaactagatcttgagacaaatggcagtattcatccacaattttaaaagaaaaggggggattggggggtacagtgcaggggaaagaatagtagacataatagcaacagacatacaaactaaag

SEQ ID NO: 21287 - DNA, 301 bp, Artificial Sequence
  NTC.41_NTC.11
  crRNA array
  misc_feature (148)..(157): n is a, c, g, or t
cttggctttatatatcttgtggaaaggacgaaacaccgtaatttctactaagtgtagatttgatggcgcgacgcgttattaatttctactaagtgtagatcgttcgtcgacgaagcaatctaatttctactaagtgtagatttttttnnnnnnnnnnaagcttggcgtggatccgatatcaactagatcttgagacaaatggcagtattcatccacaattttaaaagaaaaggggggattggggggtacagtgcaggggaaagaatagtagacataatagcaacagacatacaaactaaag

SEQ ID NO: 21288 - DNA, 301 bp, Artificial Sequence
  NTC.41_NTC.14
  crRNA array
  misc_feature (148)..(157): n is a, c, g, or t
cttggctttatatatcttgtggaaaggacgaaacaccgtaatttctactaagtgtagatttgatggcgcgacgcgttattaatttctactaagtgtagatccgttcgtgcgatagtgttttaatttctactaagtgtagatttttttnnnnnnnnnnaagcttggcgtggatccgatatcaactagatcttgagacaaatggcagtattcatccacaattttaaaagaaaaggggggattggggggtacagtgcaggggaaagaatagtagacataatagcaacagacatacaaactaaag

SEQ ID NO: 21289 - DNA, 301 bp, Artificial Sequence
  NTC.41_NTC.28
  crRNA array
  misc_feature (148)..(157): n is a, c, g, or t
cttggctttatatatcttgtggaaaggacgaaacaccgtaatttctactaagtgtagatttgatggcgcgacgcgttattaatttctactaagtgtagataccgctaatcggcgtaaacttaatttctactaagtgtagatttttttnnnnnnnnnnaagcttggcgtggatccgatatcaactagatcttgagacaaatggcagtattcatccacaattttaaaagaaaaggggggattggggggtacagtgcaggggaaagaatagtagacataatagcaacagacatacaaactaaag

SEQ ID NO: 21290 - DNA, 301 bp, Artificial Sequence
  NTC.18_NTC.24
  crRNA array
  misc_feature (148)..(157): n is a, c, g, or t
cttggctttatatatcttgtggaaaggacgaaacaccgtaatttctactaagtgtagattccggttacgaccggcaaaataatttctactaagtgtagatactatcgacgttcgtcccggtaatttctactaagtgtagatttttttnnnnnnnnnnaagcttggcgtggatccgatatcaactagatcttgagacaaatggcagtattcatccacaattttaaaagaaaaggggggattggggggtacagtgcaggggaaagaatagtagacataatagcaacagacatacaaactaaag

SEQ ID NO: 21291 - DNA, 301 bp, Artificial Sequence
  NTC.18_NTC.31
  crRNA array
  misc_feature (148)..(157): n is a, c, g, or t
cttggctttatatatcttgtggaaaggacgaaacaccgtaatttctactaagtgtagattccggttacgaccggcaaaataatttctactaagtgtagatgccgaccgcgtgattgtaggtaatttctactaagtgtagatttttttnnnnnnnnnnaagcttggcgtggatccgatatcaactagatcttgagacaaatggcagtattcatccacaattttaaaagaaaaggggggattggggggtacagtgcaggggaaagaatagtagacataatagcaacagacatacaaactaaag

SEQ ID NO: 21292 - DNA, 301 bp, Artificial Sequence
  NTC.18_NTC.51
  crRNA array
  misc_feature (148)..(157): n is a, c, g, or t
cttggctttatatatcttgtggaaaggacgaaacaccgtaatttctactaagtgtagattccggttacgaccggcaaaataatttctactaagtgtagattaacgcgcaacacgccaatgtaatttctactaagtgtagatttttttnnnnnnnnnnaagcttggcgtggatccgatatcaactagatcttgagacaaatggcagtattcatccacaattttaaaagaaaaggggggattggggggtacagtgcaggggaaagaatagtagacataatagcaacagacatacaaactaaag

SEQ ID NO: 21293 - DNA, 301 bp, Artificial Sequence
  NTC.18_NTC.23
  crRNA array
  misc_feature (148)..(157): n is a, c, g, or t
cttggctttatatatcttgtggaaaggacgaaacaccgtaatttctactaagtgtagattccggttacgaccggcaaaataatttctactaagtgtagatacgcgctattatcgtaggtgtaatttctactaagtgtagatttttttnnnnnnnnnnaagcttggcgtggatccgatatcaactagatcttgagacaaatggcagtattcatccacaattttaaaagaaaaggggggattggggggtacagtgcaggggaaagaatagtagacataatagcaacagacatacaaactaaag

SEQ ID NO: 21294 - DNA, 301 bp, Artificial Sequence
  NTC.18_NTC.36
  crRNA array
  misc_feature (148)..(157): n is a, c, g, or t
cttggctttatatatcttgtggaaaggacgaaacaccgtaatttctactaagtgtagattccggttacgaccggcaaaataatttctactaagtgtagatcaacccgccgtagcgggccttaatttctactaagtgtagatttttttnnnnnnnnnnaagcttggcgtggatccgatatcaactagatcttgagacaaatggcagtattcatccacaattttaaaagaaaaggggggattggggggtacagtgcaggggaaagaatagtagacataatagcaacagacatacaaactaaag

SEQ ID NO: 21295 - DNA, 301 bp, Artificial Sequence
  NTC.18_NTC.15
  crRNA array
  misc_feature (148)..(157): n is a, c, g, or t
cttggctttatatatcttgtggaaaggacgaaacaccgtaatttctactaagtgtagattccggttacgaccggcaaaataatttctactaagtgtagatgttgtcgtgccgcgaatttataatttctactaagtgtagatttttttnnnnnnnnnnaagcttggcgtggatccgatatcaactagatcttgagacaaatggcagtattcatccacaattttaaaagaaaaggggggattggggggtacagtgcaggggaaagaatagtagacataatagcaacagacatacaaactaaag

SEQ ID NO: 21296 - DNA, 301 bp, Artificial Sequence
  NTC.18_NTC.45
  crRNA array
  misc_feature (148)..(157): n is a, c, g, or t
cttggctttatatatcttgtggaaaggacgaaacaccgtaatttctactaagtgtagattccggttacgaccggcaaaataatttctactaagtgtagatcggaacgcgtgatactagggtaatttctactaagtgtagatttttttnnnnnnnnnnaagcttggcgtggatccgatatcaactagatcttgagacaaatggcagtattcatccacaattttaaaagaaaaggggggattggggggtacagtgcaggggaaagaatagtagacataatagcaacagacatacaaactaaag

SEQ ID NO: 21297 - DNA, 301 bp, Artificial Sequence
  NTC.18_NTC.12
  crRNA array
  misc_feature (148)..(157): n is a, c, g, or t
cttggctttatatatcttgtggaaaggacgaaacaccgtaatttctactaagtgtagattccggttacgaccggcaaaataatttctactaagtgtagatcgccgacgattaatcaatagtaatttctactaagtgtagatttttttnnnnnnnnnnaagcttggcgtggatccgatatcaactagatcttgagacaaatggcagtattcatccacaattttaaaagaaaaggggggattggggggtacagtgcaggggaaagaatagtagacataatagcaacagacatacaaactaaag

SEQ ID NO: 21298 - DNA, 301 bp, Artificial Sequence
  NTC.18_NTC.19
  crRNA array
  misc_feature (148)..(157): n is a, c, g, or t
cttggctttatatatcttgtggaaaggacgaaacaccgtaatttctactaagtgtagattccggttacgaccggcaaaataatttctactaagtgtagatcgtcgtagaacgatacccgataatttctactaagtgtagatttttttnnnnnnnnnnaagcttggcgtggatccgatatcaactagatcttgagacaaatggcagtattcatccacaattttaaaagaaaaggggggattggggggtacagtgcaggggaaagaatagtagacataatagcaacagacatacaaactaaag

SEQ ID NO: 21299 - DNA, 301 bp, Artificial Sequence
  NTC.18_NTC.20
  crRNA array
  misc_feature (148)..(157): n is a, c, g, or t
cttggctttatatatcttgtggaaaggacgaaacaccgtaatttctactaagtgtagattccggttacgaccggcaaaataatttctactaagtgtagatattccggcgcgaccagaagataatttctactaagtgtagatttttttnnnnnnnnnnaagcttggcgtggatccgatatcaactagatcttgagacaaatggcagtattcatccacaattttaaaagaaaaggggggattggggggtacagtgcaggggaaagaatagtagacataatagcaacagacatacaaactaaag

SEQ ID NO: 21300 - DNA, 301 bp, Artificial Sequence
  NTC.18_NTC.48
  crRNA array
  misc_feature (148)..(157): n is a, c, g, or t
cttggctttatatatcttgtggaaaggacgaaacaccgtaatttctactaagtgtagattccggttacgaccggcaaaataatttctactaagtgtagatcggtcgactacggctgttagtaatttctactaagtgtagatttttttnnnnnnnnnnaagcttggcgtggatccgatatcaactagatcttgagacaaatggcagtattcatccacaattttaaaagaaaaggggggattggggggtacagtgcaggggaaagaatagtagacataatagcaacagacatacaaactaaag

SEQ ID NO: 21301 - DNA, 301 bp, Artificial Sequence
  NTC.18_NTC.26
  crRNA array
  misc_feature (148)..(157): n is a, c, g, or t
cttggctttatatatcttgtggaaaggacgaaacaccgtaatttctactaagtgtagattccggttacgaccggcaaaataatttctactaagtgtagatcgcgacggcggttttaacactaatttctactaagtgtagatttttttnnnnnnnnnnaagcttggcgtggatccgatatcaactagatcttgagacaaatggcagtattcatccacaattttaaaagaaaaggggggattggggggtacagtgcaggggaaagaatagtagacataatagcaacagacatacaaactaaag

SEQ ID NO: 21302 - DNA, 301 bp, Artificial Sequence
  NTC.18_NTC.27
  crRNA array
  misc_feature (148)..(157): n is a, c, g, or t
cttggctttatatatcttgtggaaaggacgaaacaccgtaatttctactaagtgtagattccggttacgaccggcaaaataatttctactaagtgtagatgtcgcgttgcgaccggcgcttaatttctactaagtgtagatttttttnnnnnnnnnnaagcttggcgtggatccgatatcaactagatcttgagacaaatggcagtattcatccacaattttaaaagaaaaggggggattggggggtacagtgcaggggaaagaatagtagacataatagcaacagacatacaaactaaag

SEQ ID NO: 21303 - DNA, 301 bp, Artificial Sequence
  NTC.18_NTC.34
  crRNA array
  misc_feature (148)..(157): n is a, c, g, or t
cttggctttatatatcttgtggaaaggacgaaacaccgtaatttctactaagtgtagattccggttacgaccggcaaaataatttctactaagtgtagattagcgttcgacacgtgaaactaatttctactaagtgtagatttttttnnnnnnnnnnaagcttggcgtggatccgatatcaactagatcttgagacaaatggcagtattcatccacaattttaaaagaaaaggggggattggggggtacagtgcaggggaaagaatagtagacataatagcaacagacatacaaactaaag

SEQ ID NO: 21304 - DNA, 301 bp, Artificial Sequence
  NTC.18_NTC.16
  crRNA array
  misc_feature (148)..(157): n is a, c, g, or t
cttggctttatatatcttgtggaaaggacgaaacaccgtaatttctactaagtgtagattccggttacgaccggcaaaataatttctactaagtgtagatcggtacgttagacgaaaatttaatttctactaagtgtagatttttttnnnnnnnnnnaagcttggcgtggatccgatatcaactagatcttgagacaaatggcagtattcatccacaattttaaaagaaaaggggggattggggggtacagtgcaggggaaagaatagtagacataatagcaacagacatacaaactaaag

SEQ ID NO: 21305 - DNA, 301 bp, Artificial Sequence
  NTC.18_NTC.4
  crRNA array
  misc_feature (148)..(157): n is a, c, g, or t
cttggctttatatatcttgtggaaaggacgaaacaccgtaatttctactaagtgtagattccggttacgaccggcaaaataatttctactaagtgtagatatacccgtcgcgaacgtgagtaatttctactaagtgtagatttttttnnnnnnnnnnaagcttggcgtggatccgatatcaactagatcttgagacaaatggcagtattcatccacaattttaaaagaaaaggggggattggggggtacagtgcaggggaaagaatagtagacataatagcaacagacatacaaactaaag

SEQ ID NO: 21306 - DNA, 301 bp, Artificial Sequence
  NTC.18_NTC.42
  crRNA array
  misc_feature (148)..(157): n is a, c, g, or t
cttggctttatatatcttgtggaaaggacgaaacaccgtaatttctactaagtgtagattccggttacgaccggcaaaataatttctactaagtgtagatggtcaaatcgcggcgataactaatttctactaagtgtagatttttttnnnnnnnnnnaagcttggcgtggatccgatatcaactagatcttgagacaaatggcagtattcatccacaattttaaaagaaaaggggggattggggggtacagtgcaggggaaagaatagtagacataatagcaacagacatacaaactaaag

SEQ ID NO: 21307 - DNA, 301 bp, Artificial Sequence
  NTC.18_NTC.22
  crRNA array
  misc_feature (148)..(157): n is a, c, g, or t
cttggctttatatatcttgtggaaaggacgaaacaccgtaatttctactaagtgtagattccggttacgaccggcaaaataatttctactaagtgtagatgcgcgtcaacgtaatgtgcctaatttctactaagtgtagatttttttnnnnnnnnnnaagcttggcgtggatccgatatcaactagatcttgagacaaatggcagtattcatccacaattttaaaagaaaaggggggattggggggtacagtgcaggggaaagaatagtagacataatagcaacagacatacaaactaaag

SEQ ID NO: 21308 - DNA, 301 bp, Artificial Sequence
  NTC.18_NTC.17
  crRNA array
  misc_feature (148)..(157): n is a, c, g, or t
cttggctttatatatcttgtggaaaggacgaaacaccgtaatttctactaagtgtagattccggttacgaccggcaaaataatttctactaagtgtagattatcgaacgctatcgaacgttaatttctactaagtgtagatttttttnnnnnnnnnnaagcttggcgtggatccgatatcaactagatcttgagacaaatggcagtattcatccacaattttaaaagaaaaggggggattggggggtacagtgcaggggaaagaatagtagacataatagcaacagacatacaaactaaag

SEQ ID NO: 21309 - DNA, 301 bp, Artificial Sequence
  NTC.18_NTC.9
  crRNA array
  misc_feature (148)..(157): n is a, c, g, or t
cttggctttatatatcttgtggaaaggacgaaacaccgtaatttctactaagtgtagattccggttacgaccggcaaaataatttctactaagtgtagatatcgccgtacggctatggcataatttctactaagtgtagatttttttnnnnnnnnnnaagcttggcgtggatccgatatcaactagatcttgagacaaatggcagtattcatccacaattttaaaagaaaaggggggattggggggtacagtgcaggggaaagaatagtagacataatagcaacagacatacaaactaaag

SEQ ID NO: 21310 - DNA, 301 bp, Artificial Sequence
  NTC.18_NTC.30
  crRNA array
  misc_feature (148)..(157): n is a, c, g, or t
cttggctttatatatcttgtggaaaggacgaaacaccgtaatttctactaagtgtagattccggttacgaccggcaaaataatttctactaagtgtagatcgatcgtacgggtgtcctaataatttctactaagtgtagatttttttnnnnnnnnnnaagcttggcgtggatccgatatcaactagatcttgagacaaatggcagtattcatccacaattttaaaagaaaaggggggattggggggtacagtgcaggggaaagaatagtagacataatagcaacagacatacaaactaaag

SEQ ID NO: 21311 - DNA, 301 bp, Artificial Sequence
  NTC.18_NTC.8
  crRNA array
  misc_feature (148)..(157): n is a, c, g, or t
cttggctttatatatcttgtggaaaggacgaaacaccgtaatttctactaagtgtagattccggttacgaccggcaaaataatttctactaagtgtagatcgaccgaggttacgctgggataatttctactaagtgtagatttttttnnnnnnnnnnaagcttggcgtggatccgatatcaactagatcttgagacaaatggcagtattcatccacaattttaaaagaaaaggggggattggggggtacagtgcaggggaaagaatagtagacataatagcaacagacatacaaactaaag

SEQ ID NO: 21312 - DNA, 301 bp, Artificial Sequence
  NTC.18_NTC.46
  crRNA array
  misc_feature (148)..(157): n is a, c, g, or t
cttggctttatatatcttgtggaaaggacgaaacaccgtaatttctactaagtgtagattccggttacgaccggcaaaataatttctactaagtgtagatagcgggtcgtagacgcgcggtaatttctactaagtgtagatttttttnnnnnnnnnnaagcttggcgtggatccgatatcaactagatcttgagacaaatggcagtattcatccacaattttaaaagaaaaggggggattggggggtacagtgcaggggaaagaatagtagacataatagcaacagacatacaaactaaag

SEQ ID NO: 21313 - DNA, 301 bp, Artificial Sequence
  NTC.18_NTC.35
  crRNA array
  misc_feature (148)..(157): n is a, c, g, or t
cttggctttatatatcttgtggaaaggacgaaacaccgtaatttctactaagtgtagattccggttacgaccggcaaaataatttctactaagtgtagattggcgcgtaatcgctattcgtaatttctactaagtgtagatttttttnnnnnnnnnnaagcttggcgtggatccgatatcaactagatcttgagacaaatggcagtattcatccacaattttaaaagaaaaggggggattggggggtacagtgcaggggaaagaatagtagacataatagcaacagacatacaaactaaag

SEQ ID NO: 21314 - DNA, 301 bp, Artificial Sequence
  NTC.18_NTC.10
  crRNA array
  misc_feature (148)..(157): n is a, c, g, or t
cttggctttatatatcttgtggaaaggacgaaacaccgtaatttctactaagtgtagattccggttacgaccggcaaaataatttctactaagtgtagatcgctaagttcgcgcgggccgtaatttctactaagtgtagatttttttnnnnnnnnnnaagcttggcgtggatccgatatcaactagatcttgagacaaatggcagtattcatccacaattttaaaagaaaaggggggattggggggtacagtgcaggggaaagaatagtagacataatagcaacagacatacaaactaaag

SEQ ID NO: 21315 - DNA, 301 bp, Artificial Sequence
  NTC.18_NTC.11
  crRNA array
  misc_feature (148)..(157): n is a, c, g, or t
cttggctttatatatcttgtggaaaggacgaaacaccgtaatttctactaagtgtagattccggttacgaccggcaaaataatttctactaagtgtagatcgttcgtcgacgaagcaatctaatttctactaagtgtagatttttttnnnnnnnnnnaagcttggcgtggatccgatatcaactagatcttgagacaaatggcagtattcatccacaattttaaaagaaaaggggggattggggggtacagtgcaggggaaagaatagtagacataatagcaacagacatacaaactaaag

SEQ ID NO: 21316 - DNA, 301 bp, Artificial Sequence
  NTC.18_NTC.14
  crRNA array
  misc_feature (148)..(157): n is a, c, g, or t
cttggctttatatatcttgtggaaaggacgaaacaccgtaatttctactaagtgtagattccggttacgaccggcaaaataatttctactaagtgtagatccgttcgtgcgatagtgttttaatttctactaagtgtagatttttttnnnnnnnnnnaagcttggcgtggatccgatatcaactagatcttgagacaaatggcagtattcatccacaattttaaaagaaaaggggggattggggggtacagtgcaggggaaagaatagtagacataatagcaacagacatacaaactaaag

SEQ ID NO: 21317 - DNA, 301 bp, Artificial Sequence
  NTC.18_NTC.28
  crRNA array
  misc_feature (148)..(157): n is a, c, g, or t
cttggctttatatatcttgtggaaaggacgaaacaccgtaatttctactaagtgtagattccggttacgaccggcaaaataatttctactaagtgtagataccgctaatcggcgtaaacttaatttctactaagtgtagatttttttnnnnnnnnnnaagcttggcgtggatccgatatcaactagatcttgagacaaatggcagtattcatccacaattttaaaagaaaaggggggattggggggtacagtgcaggggaaagaatagtagacataatagcaacagacatacaaactaaag

SEQ ID NO: 21318 - DNA, 301 bp, Artificial Sequence
  NTC.24_NTC.31
  crRNA array
  misc_feature (148)..(157): n is a, c, g, or t
cttggctttatatatcttgtggaaaggacgaaacaccgtaatttctactaagtgtagatactatcgacgttcgtcccggtaatttctactaagtgtagatgccgaccgcgtgattgtaggtaatttctactaagtgtagatttttttnnnnnnnnnnaagcttggcgtggatccgatatcaactagatcttgagacaaatggcagtattcatccacaattttaaaagaaaaggggggattggggggtacagtgcaggggaaagaatagtagacataatagcaacagacatacaaactaaag

SEQ ID NO: 21319 - DNA, 301 bp, Artificial Sequence
  NTC.24_NTC.51
  crRNA array
  misc_feature (148)..(157): n is a, c, g, or t
cttggctttatatatcttgtggaaaggacgaaacaccgtaatttctactaagtgtagatactatcgacgttcgtcccggtaatttctactaagtgtagattaacgcgcaacacgccaatgtaatttctactaagtgtagatttttttnnnnnnnnnnaagcttggcgtggatccgatatcaactagatcttgagacaaatggcagtattcatccacaattttaaaagaaaaggggggattggggggtacagtgcaggggaaagaatagtagacataatagcaacagacatacaaactaaag

SEQ ID NO: 21320 - DNA, 301 bp, Artificial Sequence
  NTC.24_NTC.23
  crRNA array
  misc_feature (148)..(157): n is a, c, g, or t
cttggctttatatatcttgtggaaaggacgaaacaccgtaatttctactaagtgtagatactatcgacgttcgtcccggtaatttctactaagtgtagatacgcgctattatcgtaggtgtaatttctactaagtgtagatttttttnnnnnnnnnnaagcttggcgtggatccgatatcaactagatcttgagacaaatggcagtattcatccacaattttaaaagaaaaggggggattggggggtacagtgcaggggaaagaatagtagacataatagcaacagacatacaaactaaag

SEQ ID NO: 21321 - DNA, 301 bp, Artificial Sequence
  NTC.24_NTC.36
  crRNA array
  misc_feature (148)..(157): n is a, c, g, or t
cttggctttatatatcttgtggaaaggacgaaacaccgtaatttctactaagtgtagatactatcgacgttcgtcccggtaatttctactaagtgtagatcaacccgccgtagcgggccttaatttctactaagtgtagatttttttnnnnnnnnnnaagcttggcgtggatccgatatcaactagatcttgagacaaatggcagtattcatccacaattttaaaagaaaaggggggattggggggtacagtgcaggggaaagaatagtagacataatagcaacagacatacaaactaaag

SEQ ID NO: 21322 - DNA, 301 bp, Artificial Sequence
  NTC.24_NTC.15
  crRNA array
  misc_feature (148)..(157): n is a, c, g, or t
cttggctttatatatcttgtggaaaggacgaaacaccgtaatttctactaagtgtagatactatcgacgttcgtcccggtaatttctactaagtgtagatgttgtcgtgccgcgaatttataatttctactaagtgtagatttttttnnnnnnnnnnaagcttggcgtggatccgatatcaactagatcttgagacaaatggcagtattcatccacaattttaaaagaaaaggggggattggggggtacagtgcaggggaaagaatagtagacataatagcaacagacatacaaactaaag

SEQ ID NO: 21323 - DNA, 301 bp, Artificial Sequence
  NTC.24_NTC.45
  crRNA array
  misc_feature (148)..(157): n is a, c, g, or t
cttggctttatatatcttgtggaaaggacgaaacaccgtaatttctactaagtgtagatactatcgacgttcgtcccggtaatttctactaagtgtagatcggaacgcgtgatactagggtaatttctactaagtgtagatttttttnnnnnnnnnnaagcttggcgtggatccgatatcaactagatcttgagacaaatggcagtattcatccacaattttaaaagaaaaggggggattggggggtacagtgcaggggaaagaatagtagacataatagcaacagacatacaaactaaag

SEQ ID NO: 21324 - DNA, 301 bp, Artificial Sequence
  NTC.24_NTC.12
  crRNA array
  misc_feature (148)..(157): n is a, c, g, or t
cttggctttatatatcttgtggaaaggacgaaacaccgtaatttctactaagtgtagatactatcgacgttcgtcccggtaatttctactaagtgtagatcgccgacgattaatcaatagtaatttctactaagtgtagatttttttnnnnnnnnnnaagcttggcgtggatccgatatcaactagatcttgagacaaatggcagtattcatccacaattttaaaagaaaaggggggattggggggtacagtgcaggggaaagaatagtagacataatagcaacagacatacaaactaaag

SEQ ID NO: 21325 - DNA, 301 bp, Artificial Sequence
  NTC.24_NTC.19
  crRNA array
  misc_feature (148)..(157): n is a, c, g, or t
cttggctttatatatcttgtggaaaggacgaaacaccgtaatttctactaagtgtagatactatcgacgttcgtcccggtaatttctactaagtgtagatcgtcgtagaacgatacccgataatttctactaagtgtagatttttttnnnnnnnnnnaagcttggcgtggatccgatatcaactagatcttgagacaaatggcagtattcatccacaattttaaaagaaaaggggggattggggggtacagtgcaggggaaagaatagtagacataatagcaacagacatacaaactaaag

SEQ ID NO: 21326 - DNA, 301 bp, Artificial Sequence
  NTC.24_NTC.20
  crRNA array
  misc_feature (148)..(157): n is a, c, g, or t
cttggctttatatatcttgtggaaaggacgaaacaccgtaatttctactaagtgtagatactatcgacgttcgtcccggtaatttctactaagtgtagatattccggcgcgaccagaagataatttctactaagtgtagatttttttnnnnnnnnnnaagcttggcgtggatccgatatcaactagatcttgagacaaatggcagtattcatccacaattttaaaagaaaaggggggattggggggtacagtgcaggggaaagaatagtagacataatagcaacagacatacaaactaaag

SEQ ID NO: 21327 - DNA, 301 bp, Artificial Sequence
  NTC.24_NTC.48
  crRNA array
  misc_feature (148)..(157): n is a, c, g, or t
cttggctttatatatcttgtggaaaggacgaaacaccgtaatttctactaagtgtagatactatcgacgttcgtcccggtaatttctactaagtgtagatcggtcgactacggctgttagtaatttctactaagtgtagatttttttnnnnnnnnnnaagcttggcgtggatccgatatcaactagatcttgagacaaatggcagtattcatccacaattttaaaagaaaaggggggattggggggtacagtgcaggggaaagaatagtagacataatagcaacagacatacaaactaaag

SEQ ID NO: 21328 - DNA, 301 bp, Artificial Sequence
  NTC.24_NTC.26
  crRNA array
  misc_feature (148)..(157): n is a, c, g, or t
cttggctttatatatcttgtggaaaggacgaaacaccgtaatttctactaagtgtagatactatcgacgttcgtcccggtaatttctactaagtgtagatcgcgacggcggttttaacactaatttctactaagtgtagatttttttnnnnnnnnnnaagcttggcgtggatccgatatcaactagatcttgagacaaatggcagtattcatccacaattttaaaagaaaaggggggattggggggtacagtgcaggggaaagaatagtagacataatagcaacagacatacaaactaaag

SEQ ID NO: 21329 - DNA, 301 bp, Artificial Sequence
  NTC.24_NTC.27
  crRNA array
  misc_feature (148)..(157): n is a, c, g, or t
cttggctttatatatcttgtggaaaggacgaaacaccgtaatttctactaagtgtagatactatcgacgttcgtcccggtaatttctactaagtgtagatgtcgcgttgcgaccggcgcttaatttctactaagtgtagatttttttnnnnnnnnnnaagcttggcgtggatccgatatcaactagatcttgagacaaatggcagtattcatccacaattttaaaagaaaaggggggattggggggtacagtgcaggggaaagaatagtagacataatagcaacagacatacaaactaaag

SEQ ID NO: 21330 - DNA, 301 bp, Artificial Sequence
  NTC.24_NTC.34
  crRNA array
  misc_feature (148)..(157): n is a, c, g, or t
cttggctttatatatcttgtggaaaggacgaaacaccgtaatttctactaagtgtagatactatcgacgttcgtcccggtaatttctactaagtgtagattagcgttcgacacgtgaaactaatttctactaagtgtagatttttttnnnnnnnnnnaagcttggcgtggatccgatatcaactagatcttgagacaaatggcagtattcatccacaattttaaaagaaaaggggggattggggggtacagtgcaggggaaagaatagtagacataatagcaacagacatacaaactaaag

SEQ ID NO: 21331 - DNA, 301 bp, Artificial Sequence
  NTC.24_NTC.16
  crRNA array
  misc_feature (148)..(157): n is a, c, g, or t
cttggctttatatatcttgtggaaaggacgaaacaccgtaatttctactaagtgtagatactatcgacgttcgtcccggtaatttctactaagtgtagatcggtacgttagacgaaaatttaatttctactaagtgtagatttttttnnnnnnnnnnaagcttggcgtggatccgatatcaactagatcttgagacaaatggcagtattcatccacaattttaaaagaaaaggggggattggggggtacagtgcaggggaaagaatagtagacataatagcaacagacatacaaactaaag

SEQ ID NO: 21332 - DNA, 301 bp, Artificial Sequence
  NTC.24_NTC.4
  crRNA array
  misc_feature (148)..(157): n is a, c, g, or t
cttggctttatatatcttgtggaaaggacgaaacaccgtaatttctactaagtgtagatactatcgacgttcgtcccggtaatttctactaagtgtagatatacccgtcgcgaacgtgagtaatttctactaagtgtagatttttttnnnnnnnnnnaagcttggcgtggatccgatatcaactagatcttgagacaaatggcagtattcatccacaattttaaaagaaaaggggggattggggggtacagtgcaggggaaagaatagtagacataatagcaacagacatacaaactaaag

SEQ ID NO: 21333 - DNA, 301 bp, Artificial Sequence
  NTC.24_NTC.42
  crRNA array
  misc_feature (148)..(157): n is a, c, g, or t
cttggctttatatatcttgtggaaaggacgaaacaccgtaatttctactaagtgtagatactatcgacgttcgtcccggtaatttctactaagtgtagatggtcaaatcgcggcgataactaatttctactaagtgtagatttttttnnnnnnnnnnaagcttggcgtggatccgatatcaactagatcttgagacaaatggcagtattcatccacaattttaaaagaaaaggggggattggggggtacagtgcaggggaaagaatagtagacataatagcaacagacatacaaactaaag

SEQ ID NO: 21334 - DNA, 301 bp, Artificial Sequence
  NTC.24_NTC.22
  crRNA array
  misc_feature (148)..(157): n is a, c, g, or t
cttggctttatatatcttgtggaaaggacgaaacaccgtaatttctactaagtgtagatactatcgacgttcgtcccggtaatttctactaagtgtagatgcgcgtcaacgtaatgtgcctaatttctactaagtgtagatttttttnnnnnnnnnnaagcttggcgtggatccgatatcaactagatcttgagacaaatggcagtattcatccacaattttaaaagaaaaggggggattggggggtacagtgcaggggaaagaatagtagacataatagcaacagacatacaaactaaag

SEQ ID NO: 21335 - DNA, 301 bp, Artificial Sequence
  NTC.24_NTC.17
  crRNA array
  misc_feature (148)..(157): n is a, c, g, or t
cttggctttatatatcttgtggaaaggacgaaacaccgtaatttctactaagtgtagatactatcgacgttcgtcccggtaatttctactaagtgtagattatcgaacgctatcgaacgttaatttctactaagtgtagatttttttnnnnnnnnnnaagcttggcgtggatccgatatcaactagatcttgagacaaatggcagtattcatccacaattttaaaagaaaaggggggattggggggtacagtgcaggggaaagaatagtagacataatagcaacagacatacaaactaaag

SEQ ID NO: 21336 - DNA, 301 bp, Artificial Sequence
  NTC.24_NTC.9
  crRNA array
  misc_feature (148)..(157): n is a, c, g, or t
cttggctttatatatcttgtggaaaggacgaaacaccgtaatttctactaagtgtagatactatcgacgttcgtcccggtaatttctactaagtgtagatatcgccgtacggctatggcataatttctactaagtgtagatttttttnnnnnnnnnnaagcttggcgtggatccgatatcaactagatcttgagacaaatggcagtattcatccacaattttaaaagaaaaggggggattggggggtacagtgcaggggaaagaatagtagacataatagcaacagacatacaaactaaag

SEQ ID NO: 21337 - DNA, 301 bp, Artificial Sequence
  NTC.24_NTC.30
  crRNA array
  misc_feature (148)..(157): n is a, c, g, or t
cttggctttatatatcttgtggaaaggacgaaacaccgtaatttctactaagtgtagatactatcgacgttcgtcccggtaatttctactaagtgtagatcgatcgtacgggtgtcctaataatttctactaagtgtagatttttttnnnnnnnnnnaagcttggcgtggatccgatatcaactagatcttgagacaaatggcagtattcatccacaattttaaaagaaaaggggggattggggggtacagtgcaggggaaagaatagtagacataatagcaacagacatacaaactaaag

SEQ ID NO: 21338 - DNA, 301 bp, Artificial Sequence
  NTC.24_NTC.8
  crRNA array
  misc_feature (148)..(157): n is a, c, g, or t
cttggctttatatatcttgtggaaaggacgaaacaccgtaatttctactaagtgtagatactatcgacgttcgtcccggtaatttctactaagtgtagatcgaccgaggttacgctgggataatttctactaagtgtagatttttttnnnnnnnnnnaagcttggcgtggatccgatatcaactagatcttgagacaaatggcagtattcatccacaattttaaaagaaaaggggggattggggggtacagtgcaggggaaagaatagtagacataatagcaacagacatacaaactaaag

SEQ ID NO: 21339 - DNA, 301 bp, Artificial Sequence
  NTC.24_NTC.46
  crRNA array
  misc_feature (148)..(157): n is a, c, g, or t
cttggctttatatatcttgtggaaaggacgaaacaccgtaatttctactaagtgtagatactatcgacgttcgtcccggtaatttctactaagtgtagatagcgggtcgtagacgcgcggtaatttctactaagtgtagatttttttnnnnnnnnnnaagcttggcgtggatccgatatcaactagatcttgagacaaatggcagtattcatccacaattttaaaagaaaaggggggattggggggtacagtgcaggggaaagaatagtagacataatagcaacagacatacaaactaaag

SEQ ID NO: 21340 - DNA, 301 bp, Artificial Sequence
  NTC.24_NTC.35
  crRNA array
  misc_feature (148)..(157): n is a, c, g, or t
cttggctttatatatcttgtggaaaggacgaaacaccgtaatttctactaagtgtagatactatcgacgttcgtcccggtaatttctactaagtgtagattggcgcgtaatcgctattcgtaatttctactaagtgtagatttttttnnnnnnnnnnaagcttggcgtggatccgatatcaactagatcttgagacaaatggcagtattcatccacaattttaaaagaaaaggggggattggggggtacagtgcaggggaaagaatagtagacataatagcaacagacatacaaactaaag

SEQ ID NO: 21341 - DNA, 301 bp, Artificial Sequence
  NTC.24_NTC.10
  crRNA array
  misc_feature (148)..(157): n is a, c, g, or t
cttggctttatatatcttgtggaaaggacgaaacaccgtaatttctactaagtgtagatactatcgacgttcgtcccggtaatttctactaagtgtagatcgctaagttcgcgcgggccgtaatttctactaagtgtagatttttttnnnnnnnnnnaagcttggcgtggatccgatatcaactagatcttgagacaaatggcagtattcatccacaattttaaaagaaaaggggggattggggggtacagtgcaggggaaagaatagtagacataatagcaacagacatacaaactaaag

SEQ ID NO: 21342 - DNA, 301 bp, Artificial Sequence
  NTC.24_NTC.11
  crRNA array
  misc_feature (148)..(157): n is a, c, g, or t
cttggctttatatatcttgtggaaaggacgaaacaccgtaatttctactaagtgtagatactatcgacgttcgtcccggtaatttctactaagtgtagatcgttcgtcgacgaagcaatctaatttctactaagtgtagatttttttnnnnnnnnnnaagcttggcgtggatccgatatcaactagatcttgagacaaatggcagtattcatccacaattttaaaagaaaaggggggattggggggtacagtgcaggggaaagaatagtagacataatagcaacagacatacaaactaaag

SEQ ID NO: 21343 - DNA, 301 bp, Artificial Sequence
  NTC.24_NTC.14
  crRNA array
  misc_feature (148)..(157): n is a, c, g, or t
cttggctttatatatcttgtggaaaggacgaaacaccgtaatttctactaagtgtagatactatcgacgttcgtcccggtaatttctactaagtgtagatccgttcgtgcgatagtgttttaatttctactaagtgtagatttttttnnnnnnnnnnaagcttggcgtggatccgatatcaactagatcttgagacaaatggcagtattcatccacaattttaaaagaaaaggggggattggggggtacagtgcaggggaaagaatagtagacataatagcaacagacatacaaactaaag

SEQ ID NO: 21344 - DNA, 301 bp, Artificial Sequence
  NTC.24_NTC.28
  crRNA array
  misc_feature (148)..(157): n is a, c, g, or t
cttggctttatatatcttgtggaaaggacgaaacaccgtaatttctactaagtgtagatactatcgacgttcgtcccggtaatttctactaagtgtagataccgctaatcggcgtaaacttaatttctactaagtgtagatttttttnnnnnnnnnnaagcttggcgtggatccgatatcaactagatcttgagacaaatggcagtattcatccacaattttaaaagaaaaggggggattggggggtacagtgcaggggaaagaatagtagacataatagcaacagacatacaaactaaag

SEQ ID NO: 21345 - DNA, 301 bp, Artificial Sequence
  NTC.31_NTC.51
  crRNA array
  misc_feature (148)..(157): n is a, c, g, or t
cttggctttatatatcttgtggaaaggacgaaacaccgtaatttctactaagtgtagatgccgaccgcgtgattgtaggtaatttctactaagtgtagattaacgcgcaacacgccaatgtaatttctactaagtgtagatttttttnnnnnnnnnnaagcttggcgtggatccgatatcaactagatcttgagacaaatggcagtattcatccacaattttaaaagaaaaggggggattggggggtacagtgcaggggaaagaatagtagacataatagcaacagacatacaaactaaag

SEQ ID NO: 21346 - DNA, 301 bp, Artificial Sequence
  NTC.31_NTC.23
  crRNA array
  misc_feature (148)..(157): n is a, c, g, or t
cttggctttatatatcttgtggaaaggacgaaacaccgtaatttctactaagtgtagatgccgaccgcgtgattgtaggtaatttctactaagtgtagatacgcgctattatcgtaggtgtaatttctactaagtgtagatttttttnnnnnnnnnnaagcttggcgtggatccgatatcaactagatcttgagacaaatggcagtattcatccacaattttaaaagaaaaggggggattggggggtacagtgcaggggaaagaatagtagacataatagcaacagacatacaaactaaag

SEQ ID NO: 21347 - DNA, 301 bp, Artificial Sequence
  NTC.31_NTC.36
  crRNA array
  misc_feature (148)..(157): n is a, c, g, or t
cttggctttatatatcttgtggaaaggacgaaacaccgtaatttctactaagtgtagatgccgaccgcgtgattgtaggtaatttctactaagtgtagatcaacccgccgtagcgggccttaatttctactaagtgtagatttttttnnnnnnnnnnaagcttggcgtggatccgatatcaactagatcttgagacaaatggcagtattcatccacaattttaaaagaaaaggggggattggggggtacagtgcaggggaaagaatagtagacataatagcaacagacatacaaactaaag

SEQ ID NO: 21348 - DNA, 301 bp, Artificial Sequence
  NTC.31_NTC.15
  crRNA array
  misc_feature (148)..(157): n is a, c, g, or t
cttggctttatatatcttgtggaaaggacgaaacaccgtaatttctactaagtgtagatgccgaccgcgtgattgtaggtaatttctactaagtgtagatgttgtcgtgccgcgaatttataatttctactaagtgtagatttttttnnnnnnnnnnaagcttggcgtggatccgatatcaactagatcttgagacaaatggcagtattcatccacaattttaaaagaaaaggggggattggggggtacagtgcaggggaaagaatagtagacataatagcaacagacatacaaactaaag

SEQ ID NO: 21349 - DNA, 301 bp, Artificial Sequence
  NTC.31_NTC.45
  crRNA array
  misc_feature (148)..(157): n is a, c, g, or t
cttggctttatatatcttgtggaaaggacgaaacaccgtaatttctactaagtgtagatgccgaccgcgtgattgtaggtaatttctactaagtgtagatcggaacgcgtgatactagggtaatttctactaagtgtagatttttttnnnnnnnnnnaagcttggcgtggatccgatatcaactagatcttgagacaaatggcagtattcatccacaattttaaaagaaaaggggggattggggggtacagtgcaggggaaagaatagtagacataatagcaacagacatacaaactaaag

SEQ ID NO: 21350 - DNA, 301 bp, Artificial Sequence
  NTC.31_NTC.12
  crRNA array
  misc_feature (148)..(157): n is a, c, g, or t
cttggctttatatatcttgtggaaaggacgaaacaccgtaatttctactaagtgtagatgccgaccgcgtgattgtaggtaatttctactaagtgtagatcgccgacgattaatcaatagtaatttctactaagtgtagatttttttnnnnnnnnnnaagcttggcgtggatccgatatcaactagatcttgagacaaatggcagtattcatccacaattttaaaagaaaaggggggattggggggtacagtgcaggggaaagaatagtagacataatagcaacagacatacaaactaaag

SEQ ID NO: 21351 - DNA, 301 bp, Artificial Sequence
  NTC.31_NTC.19
  crRNA array
  misc_feature (148)..(157): n is a, c, g, or t
cttggctttatatatcttgtggaaaggacgaaacaccgtaatttctactaagtgtagatgccgaccgcgtgattgtaggtaatttctactaagtgtagatcgtcgtagaacgatacccgataatttctactaagtgtagatttttttnnnnnnnnnnaagcttggcgtggatccgatatcaactagatcttgagacaaatggcagtattcatccacaattttaaaagaaaaggggggattggggggtacagtgcaggggaaagaatagtagacataatagcaacagacatacaaactaaag

SEQ ID NO: 21352 - DNA, 301 bp, Artificial Sequence
  NTC.31_NTC.20
  crRNA array
  misc_feature (148)..(157): n is a, c, g, or t
cttggctttatatatcttgtggaaaggacgaaacaccgtaatttctactaagtgtagatgccgaccgcgtgattgtaggtaatttctactaagtgtagatattccggcgcgaccagaagataatttctactaagtgtagatttttttnnnnnnnnnnaagcttggcgtggatccgatatcaactagatcttgagacaaatggcagtattcatccacaattttaaaagaaaaggggggattggggggtacagtgcaggggaaagaatagtagacataatagcaacagacatacaaactaaag

SEQ ID NO: 21353 - DNA, 301 bp, Artificial Sequence
  NTC.31_NTC.48
  crRNA array
  misc_feature (148)..(157): n is a, c, g, or t
cttggctttatatatcttgtggaaaggacgaaacaccgtaatttctactaagtgtagatgccgaccgcgtgattgtaggtaatttctactaagtgtagatcggtcgactacggctgttagtaatttctactaagtgtagatttttttnnnnnnnnnnaagcttggcgtggatccgatatcaactagatcttgagacaaatggcagtattcatccacaattttaaaagaaaaggggggattggggggtacagtgcaggggaaagaatagtagacataatagcaacagacatacaaactaaag

SEQ ID NO: 21354 - DNA, 301 bp, Artificial Sequence
  NTC.31_NTC.26
  crRNA array
  misc_feature (148)..(157): n is a, c, g, or t
cttggctttatatatcttgtggaaaggacgaaacaccgtaatttctactaagtgtagatgccgaccgcgtgattgtaggtaatttctactaagtgtagatcgcgacggcggttttaacactaatttctactaagtgtagatttttttnnnnnnnnnnaagcttggcgtggatccgatatcaactagatcttgagacaaatggcagtattcatccacaattttaaaagaaaaggggggattggggggtacagtgcaggggaaagaatagtagacataatagcaacagacatacaaactaaag

SEQ ID NO: 21355 - DNA, 301 bp, Artificial Sequence
  NTC.31_NTC.27
  crRNA array
  misc_feature (148)..(157): n is a, c, g, or t
cttggctttatatatcttgtggaaaggacgaaacaccgtaatttctactaagtgtagatgccgaccgcgtgattgtaggtaatttctactaagtgtagatgtcgcgttgcgaccggcgcttaatttctactaagtgtagatttttttnnnnnnnnnnaagcttggcgtggatccgatatcaactagatcttgagacaaatggcagtattcatccacaattttaaaagaaaaggggggattggggggtacagtgcaggggaaagaatagtagacataatagcaacagacatacaaactaaag

SEQ ID NO: 21356 - DNA, 301 bp, Artificial Sequence
  NTC.31_NTC.34
  crRNA array
  misc_feature (148)..(157): n is a, c, g, or t
cttggctttatatatcttgtggaaaggacgaaacaccgtaatttctactaagtgtagatgccgaccgcgtgattgtaggtaatttctactaagtgtagattagcgttcgacacgtgaaactaatttctactaagtgtagatttttttnnnnnnnnnnaagcttggcgtggatccgatatcaactagatcttgagacaaatggcagtattcatccacaattttaaaagaaaaggggggattggggggtacagtgcaggggaaagaatagtagacataatagcaacagacatacaaactaaag

SEQ ID NO: 21357 - DNA, 301 bp, Artificial Sequence
  NTC.31_NTC.16
  crRNA array
  misc_feature (148)..(157): n is a, c, g, or t
cttggctttatatatcttgtggaaaggacgaaacaccgtaatttctactaagtgtagatgccgaccgcgtgattgtaggtaatttctactaagtgtagatcggtacgttagacgaaaatttaatttctactaagtgtagatttttttnnnnnnnnnnaagcttggcgtggatccgatatcaactagatcttgagacaaatggcagtattcatccacaattttaaaagaaaaggggggattggggggtacagtgcaggggaaagaatagtagacataatagcaacagacatacaaactaaag

SEQ ID NO: 21358 - DNA, 301 bp, Artificial Sequence
  NTC.31_NTC.4
  crRNA array
  misc_feature (148)..(157): n is a, c, g, or t
cttggctttatatatcttgtggaaaggacgaaacaccgtaatttctactaagtgtagatgccgaccgcgtgattgtaggtaatttctactaagtgtagatatacccgtcgcgaacgtgagtaatttctactaagtgtagatttttttnnnnnnnnnnaagcttggcgtggatccgatatcaactagatcttgagacaaatggcagtattcatccacaattttaaaagaaaaggggggattggggggtacagtgcaggggaaagaatagtagacataatagcaacagacatacaaactaaag

SEQ ID NO: 21359 - DNA, 301 bp, Artificial Sequence
  NTC.31_NTC.42
  crRNA array
  misc_feature (148)..(157): n is a, c, g, or t
cttggctttatatatcttgtggaaaggacgaaacaccgtaatttctactaagtgtagatgccgaccgcgtgattgtaggtaatttctactaagtgtagatggtcaaatcgcggcgataactaatttctactaagtgtagatttttttnnnnnnnnnnaagcttggcgtggatccgatatcaactagatcttgagacaaatggcagtattcatccacaattttaaaagaaaaggggggattggggggtacagtgcaggggaaagaatagtagacataatagcaacagacatacaaactaaag

SEQ ID NO: 21360 - DNA, 301 bp, Artificial Sequence
  NTC.31_NTC.22
  crRNA array
  misc_feature (148)..(157): n is a, c, g, or t
cttggctttatatatcttgtggaaaggacgaaacaccgtaatttctactaagtgtagatgccgaccgcgtgattgtaggtaatttctactaagtgtagatgcgcgtcaacgtaatgtgcctaatttctactaagtgtagatttttttnnnnnnnnnnaagcttggcgtggatccgatatcaactagatcttgagacaaatggcagtattcatccacaattttaaaagaaaaggggggattggggggtacagtgcaggggaaagaatagtagacataatagcaacagacatacaaactaaag

SEQ ID NO: 21361 - DNA, 301 bp, Artificial Sequence
  NTC.31_NTC.17
  crRNA array
  misc_feature (148)..(157): n is a, c, g, or t
cttggctttatatatcttgtggaaaggacgaaacaccgtaatttctactaagtgtagatgccgaccgcgtgattgtaggtaatttctactaagtgtagattatcgaacgctatcgaacgttaatttctactaagtgtagatttttttnnnnnnnnnnaagcttggcgtggatccgatatcaactagatcttgagacaaatggcagtattcatccacaattttaaaagaaaaggggggattggggggtacagtgcaggggaaagaatagtagacataatagcaacagacatacaaactaaag

SEQ ID NO: 21362 - DNA, 301 bp, Artificial Sequence
  NTC.31_NTC.9
  crRNA array
  misc_feature (148)..(157): n is a, c, g, or t
cttggctttatatatcttgtggaaaggacgaaacaccgtaatttctactaagtgtagatgccgaccgcgtgattgtaggtaatttctactaagtgtagatatcgccgtacggctatggcataatttctactaagtgtagatttttttnnnnnnnnnnaagcttggcgtggatccgatatcaactagatcttgagacaaatggcagtattcatccacaattttaaaagaaaaggggggattggggggtacagtgcaggggaaagaatagtagacataatagcaacagacatacaaactaaag

SEQ ID NO: 21363 - DNA, 301 bp, Artificial Sequence
  NTC.31_NTC.30
  crRNA array
  misc_feature (148)..(157): n is a, c, g, or t
cttggctttatatatcttgtggaaaggacgaaacaccgtaatttctactaagtgtagatgccgaccgcgtgattgtaggtaatttctactaagtgtagatcgatcgtacgggtgtcctaataatttctactaagtgtagatttttttnnnnnnnnnnaagcttggcgtggatccgatatcaactagatcttgagacaaatggcagtattcatccacaattttaaaagaaaaggggggattggggggtacagtgcaggggaaagaatagtagacataatagcaacagacatacaaactaaag

SEQ ID NO: 21364 - DNA, 301 bp, Artificial Sequence
  NTC.31_NTC.8
  crRNA array
  misc_feature (148)..(157): n is a, c, g, or t
cttggctttatatatcttgtggaaaggacgaaacaccgtaatttctactaagtgtagatgccgaccgcgtgattgtaggtaatttctactaagtgtagatcgaccgaggttacgctgggataatttctactaagtgtagatttttttnnnnnnnnnnaagcttggcgtggatccgatatcaactagatcttgagacaaatggcagtattcatccacaattttaaaagaaaaggggggattggggggtacagtgcaggggaaagaatagtagacataatagcaacagacatacaaactaaag

SEQ ID NO: 21365 - DNA, 301 bp, Artificial Sequence
  NTC.31_NTC.46
  crRNA array
  misc_feature (148)..(157): n is a, c, g, or t
cttggctttatatatcttgtggaaaggacgaaacaccgtaatttctactaagtgtagatgccgaccgcgtgattgtaggtaatttctactaagtgtagatagcgggtcgtagacgcgcggtaatttctactaagtgtagatttttttnnnnnnnnnnaagcttggcgtggatccgatatcaactagatcttgagacaaatggcagtattcatccacaattttaaaagaaaaggggggattggggggtacagtgcaggggaaagaatagtagacataatagcaacagacatacaaactaaag

SEQ ID NO: 21366 - DNA, 301 bp, Artificial Sequence
  NTC.31_NTC.35
  crRNA array
  misc_feature (148)..(157): n is a, c, g, or t
cttggctttatatatcttgtggaaaggacgaaacaccgtaatttctactaagtgtagatgccgaccgcgtgattgtaggtaatttctactaagtgtagattggcgcgtaatcgctattcgtaatttctactaagtgtagatttttttnnnnnnnnnnaagcttggcgtggatccgatatcaactagatcttgagacaaatggcagtattcatccacaattttaaaagaaaaggggggattggggggtacagtgcaggggaaagaatagtagacataatagcaacagacatacaaactaaag

SEQ ID NO: 21367 - DNA, 301 bp, Artificial Sequence
  NTC.31_NTC.10
  crRNA array
  misc_feature (148)..(157): n is a, c, g, or t
cttggctttatatatcttgtggaaaggacgaaacaccgtaatttctactaagtgtagatgccgaccgcgtgattgtaggtaatttctactaagtgtagatcgctaagttcgcgcgggccgtaatttctactaagtgtagatttttttnnnnnnnnnnaagcttggcgtggatccgatatcaactagatcttgagacaaatggcagtattcatccacaattttaaaagaaaaggggggattggggggtacagtgcaggggaaagaatagtagacataatagcaacagacatacaaactaaag

SEQ ID NO: 21368 - DNA, 301 bp, Artificial Sequence
  NTC.31_NTC.11
  crRNA array
  misc_feature (148)..(157): n is a, c, g, or t
cttggctttatatatcttgtggaaaggacgaaacaccgtaatttctactaagtgtagatgccgaccgcgtgattgtaggtaatttctactaagtgtagatcgttcgtcgacgaagcaatctaatttctactaagtgtagatttttttnnnnnnnnnnaagcttggcgtggatccgatatcaactagatcttgagacaaatggcagtattcatccacaattttaaaagaaaaggggggattggggggtacagtgcaggggaaagaatagtagacataatagcaacagacatacaaactaaag

SEQ ID NO: 21369 - DNA, 301 bp, Artificial Sequence
  NTC.31_NTC.14
  crRNA array
  misc_feature (148)..(157): n is a, c, g, or t
cttggctttatatatcttgtggaaaggacgaaacaccgtaatttctactaagtgtagatgccgaccgcgtgattgtaggtaatttctactaagtgtagatccgttcgtgcgatagtgttttaatttctactaagtgtagatttttttnnnnnnnnnnaagcttggcgtggatccgatatcaactagatcttgagacaaatggcagtattcatccacaattttaaaagaaaaggggggattggggggtacagtgcaggggaaagaatagtagacataatagcaacagacatacaaactaaag

SEQ ID NO: 21370 - DNA, 301 bp, Artificial Sequence
  NTC.31_NTC.28
  crRNA array
  misc_feature (148)..(157): n is a, c, g, or t
cttggctttatatatcttgtggaaaggacgaaacaccgtaatttctactaagtgtagatgccgaccgcgtgattgtaggtaatttctactaagtgtagataccgctaatcggcgtaaacttaatttctactaagtgtagatttttttnnnnnnnnnnaagcttggcgtggatccgatatcaactagatcttgagacaaatggcagtattcatccacaattttaaaagaaaaggggggattggggggtacagtgcaggggaaagaatagtagacataatagcaacagacatacaaactaaag

SEQ ID NO: 21371 - DNA, 301 bp, Artificial Sequence
  NTC.51_NTC.23
  crRNA array
  misc_feature (148)..(157): n is a, c, g, or t
cttggctttatatatcttgtggaaaggacgaaacaccgtaatttctactaagtgtagattaacgcgcaacacgccaatgtaatttctactaagtgtagatacgcgctattatcgtaggtgtaatttctactaagtgtagatttttttnnnnnnnnnnaagcttggcgtggatccgatatcaactagatcttgagacaaatggcagtattcatccacaattttaaaagaaaaggggggattggggggtacagtgcaggggaaagaatagtagacataatagcaacagacatacaaactaaag

SEQ ID NO: 21372 - DNA, 301 bp, Artificial Sequence
  NTC.51_NTC.36
  crRNA array
  misc_feature (148)..(157): n is a, c, g, or t
cttggctttatatatcttgtggaaaggacgaaacaccgtaatttctactaagtgtagattaacgcgcaacacgccaatgtaatttctactaagtgtagatcaacccgccgtagcgggccttaatttctactaagtgtagatttttttnnnnnnnnnnaagcttggcgtggatccgatatcaactagatcttgagacaaatggcagtattcatccacaattttaaaagaaaaggggggattggggggtacagtgcaggggaaagaatagtagacataatagcaacagacatacaaactaaag

SEQ ID NO: 21373 - DNA, 301 bp, Artificial Sequence
  NTC.51_NTC.15
  crRNA array
  misc_feature (148)..(157): n is a, c, g, or t
cttggctttatatatcttgtggaaaggacgaaacaccgtaatttctactaagtgtagattaacgcgcaacacgccaatgtaatttctactaagtgtagatgttgtcgtgccgcgaatttataatttctactaagtgtagatttttttnnnnnnnnnnaagcttggcgtggatccgatatcaactagatcttgagacaaatggcagtattcatccacaattttaaaagaaaaggggggattggggggtacagtgcaggggaaagaatagtagacataatagcaacagacatacaaactaaag

SEQ ID NO: 21374 - DNA, 301 bp, Artificial Sequence
  NTC.51_NTC.45
  crRNA array
  misc_feature (148)..(157): n is a, c, g, or t
cttggctttatatatcttgtggaaaggacgaaacaccgtaatttctactaagtgtagattaacgcgcaacacgccaatgtaatttctactaagtgtagatcggaacgcgtgatactagggtaatttctactaagtgtagatttttttnnnnnnnnnnaagcttggcgtggatccgatatcaactagatcttgagacaaatggcagtattcatccacaattttaaaagaaaaggggggattggggggtacagtgcaggggaaagaatagtagacataatagcaacagacatacaaactaaag

SEQ ID NO: 21375 - DNA, 301 bp, Artificial Sequence
  NTC.51_NTC.12
  crRNA array
  misc_feature (148)..(157): n is a, c, g, or t
cttggctttatatatcttgtggaaaggacgaaacaccgtaatttctactaagtgtagattaacgcgcaacacgccaatgtaatttctactaagtgtagatcgccgacgattaatcaatagtaatttctactaagtgtagatttttttnnnnnnnnnnaagcttggcgtggatccgatatcaactagatcttgagacaaatggcagtattcatccacaattttaaaagaaaaggggggattggggggtacagtgcaggggaaagaatagtagacataatagcaacagacatacaaactaaag

SEQ ID NO: 21376 - DNA, 301 bp, Artificial Sequence
  NTC.51_NTC.19
  crRNA array
  misc_feature (148)..(157): n is a, c, g, or t
cttggctttatatatcttgtggaaaggacgaaacaccgtaatttctactaagtgtagattaacgcgcaacacgccaatgtaatttctactaagtgtagatcgtcgtagaacgatacccgataatttctactaagtgtagatttttttnnnnnnnnnnaagcttggcgtggatccgatatcaactagatcttgagacaaatggcagtattcatccacaattttaaaagaaaaggggggattggggggtacagtgcaggggaaagaatagtagacataatagcaacagacatacaaactaaag

SEQ ID NO: 21377 - DNA, 301 bp, Artificial Sequence
  NTC.51_NTC.20
  crRNA array
  misc_feature (148)..(157): n is a, c, g, or t
cttggctttatatatcttgtggaaaggacgaaacaccgtaatttctactaagtgtagattaacgcgcaacacgccaatgtaatttctactaagtgtagatattccggcgcgaccagaagataatttctactaagtgtagatttttttnnnnnnnnnnaagcttggcgtggatccgatatcaactagatcttgagacaaatggcagtattcatccacaattttaaaagaaaaggggggattggggggtacagtgcaggggaaagaatagtagacataatagcaacagacatacaaactaaag

SEQ ID NO: 21378 - DNA, 301 bp, Artificial Sequence
  NTC.51_NTC.48
  crRNA array
  misc_feature (148)..(157): n is a, c, g, or t
cttggctttatatatcttgtggaaaggacgaaacaccgtaatttctactaagtgtagattaacgcgcaacacgccaatgtaatttctactaagtgtagatcggtcgactacggctgttagtaatttctactaagtgtagatttttttnnnnnnnnnnaagcttggcgtggatccgatatcaactagatcttgagacaaatggcagtattcatccacaattttaaaagaaaaggggggattggggggtacagtgcaggggaaagaatagtagacataatagcaacagacatacaaactaaag

SEQ ID NO: 21379 - DNA, 301 bp, Artificial Sequence
  NTC.51_NTC.26
  crRNA array
  misc_feature (148)..(157): n is a, c, g, or t
cttggctttatatatcttgtggaaaggacgaaacaccgtaatttctactaagtgtagattaacgcgcaacacgccaatgtaatttctactaagtgtagatcgcgacggcggttttaacactaatttctactaagtgtagatttttttnnnnnnnnnnaagcttggcgtggatccgatatcaactagatcttgagacaaatggcagtattcatccacaattttaaaagaaaaggggggattggggggtacagtgcaggggaaagaatagtagacataatagcaacagacatacaaactaaag

SEQ ID NO: 21380 - DNA, 301 bp, Artificial Sequence
  NTC.51_NTC.27
  crRNA array
  misc_feature (148)..(157): n is a, c, g, or t
cttggctttatatatcttgtggaaaggacgaaacaccgtaatttctactaagtgtagattaacgcgcaacacgccaatgtaatttctactaagtgtagatgtcgcgttgcgaccggcgcttaatttctactaagtgtagatttttttnnnnnnnnnnaagcttggcgtggatccgatatcaactagatcttgagacaaatggcagtattcatccacaattttaaaagaaaaggggggattggggggtacagtgcaggggaaagaatagtagacataatagcaacagacatacaaactaaag

SEQ ID NO: 21381 - DNA, 301 bp, Artificial Sequence
  NTC.51_NTC.34
  crRNA array
  misc_feature (148)..(157): n is a, c, g, or t
cttggctttatatatcttgtggaaaggacgaaacaccgtaatttctactaagtgtagattaacgcgcaacacgccaatgtaatttctactaagtgtagattagcgttcgacacgtgaaactaatttctactaagtgtagatttttttnnnnnnnnnnaagcttggcgtggatccgatatcaactagatcttgagacaaatggcagtattcatccacaattttaaaagaaaaggggggattggggggtacagtgcaggggaaagaatagtagacataatagcaacagacatacaaactaaag

SEQ ID NO: 21382 - DNA, 301 bp, Artificial Sequence
  NTC.51_NTC.16
  crRNA array
  misc_feature (148)..(157): n is a, c, g, or t
cttggctttatatatcttgtggaaaggacgaaacaccgtaatttctactaagtgtagattaacgcgcaacacgccaatgtaatttctactaagtgtagatcggtacgttagacgaaaatttaatttctactaagtgtagatttttttnnnnnnnnnnaagcttggcgtggatccgatatcaactagatcttgagacaaatggcagtattcatccacaattttaaaagaaaaggggggattggggggtacagtgcaggggaaagaatagtagacataatagcaacagacatacaaactaaag

SEQ ID NO: 21383 - DNA, 301 bp, Artificial Sequence
  NTC.51_NTC.4
  crRNA array
  misc_feature (148)..(157): n is a, c, g, or t
cttggctttatatatcttgtggaaaggacgaaacaccgtaatttctactaagtgtagattaacgcgcaacacgccaatgtaatttctactaagtgtagatatacccgtcgcgaacgtgagtaatttctactaagtgtagatttttttnnnnnnnnnnaagcttggcgtggatccgatatcaactagatcttgagacaaatggcagtattcatccacaattttaaaagaaaaggggggattggggggtacagtgcaggggaaagaatagtagacataatagcaacagacatacaaactaaag

SEQ ID NO: 21384 - DNA, 301 bp, Artificial Sequence
  NTC.51_NTC.42
  crRNA array
  misc_feature (148)..(157): n is a, c, g, or t
cttggctttatatatcttgtggaaaggacgaaacaccgtaatttctactaagtgtagattaacgcgcaacacgccaatgtaatttctactaagtgtagatggtcaaatcgcggcgataactaatttctactaagtgtagatttttttnnnnnnnnnnaagcttggcgtggatccgatatcaactagatcttgagacaaatggcagtattcatccacaattttaaaagaaaaggggggattggggggtacagtgcaggggaaagaatagtagacataatagcaacagacatacaaactaaag

SEQ ID NO: 21385 - DNA, 301 bp, Artificial Sequence
  NTC.51_NTC.22
  crRNA array
  misc_feature (148)..(157): n is a, c, g, or t
cttggctttatatatcttgtggaaaggacgaaacaccgtaatttctactaagtgtagattaacgcgcaacacgccaatgtaatttctactaagtgtagatgcgcgtcaacgtaatgtgcctaatttctactaagtgtagatttttttnnnnnnnnnnaagcttggcgtggatccgatatcaactagatcttgagacaaatggcagtattcatccacaattttaaaagaaaaggggggattggggggtacagtgcaggggaaagaatagtagacataatagcaacagacatacaaactaaag

SEQ ID NO: 21386 - DNA, 301 bp, Artificial Sequence
  NTC.51_NTC.17
  crRNA array
  misc_feature (148)..(157): n is a, c, g, or t
cttggctttatatatcttgtggaaaggacgaaacaccgtaatttctactaagtgtagattaacgcgcaacacgccaatgtaatttctactaagtgtagattatcgaacgctatcgaacgttaatttctactaagtgtagatttttttnnnnnnnnnnaagcttggcgtggatccgatatcaactagatcttgagacaaatggcagtattcatccacaattttaaaagaaaaggggggattggggggtacagtgcaggggaaagaatagtagacataatagcaacagacatacaaactaaag

SEQ ID NO: 21387 - DNA, 301 bp, Artificial Sequence
  NTC.51_NTC.9
  crRNA array
  misc_feature (148)..(157): n is a, c, g, or t
cttggctttatatatcttgtggaaaggacgaaacaccgtaatttctactaagtgtagattaacgcgcaacacgccaatgtaatttctactaagtgtagatatcgccgtacggctatggcataatttctactaagtgtagatttttttnnnnnnnnnnaagcttggcgtggatccgatatcaactagatcttgagacaaatggcagtattcatccacaattttaaaagaaaaggggggattggggggtacagtgcaggggaaagaatagtagacataatagcaacagacatacaaactaaag

SEQ ID NO: 21388 - DNA, 301 bp, Artificial Sequence
  NTC.51_NTC.30
  crRNA array
  misc_feature (148)..(157): n is a, c, g, or t
cttggctttatatatcttgtggaaaggacgaaacaccgtaatttctactaagtgtagattaacgcgcaacacgccaatgtaatttctactaagtgtagatcgatcgtacgggtgtcctaataatttctactaagtgtagatttttttnnnnnnnnnnaagcttggcgtggatccgatatcaactagatcttgagacaaatggcagtattcatccacaattttaaaagaaaaggggggattggggggtacagtgcaggggaaagaatagtagacataatagcaacagacatacaaactaaag

SEQ ID NO: 21389 - DNA, 301 bp, Artificial Sequence
  NTC.51_NTC.8
  crRNA array
  misc_feature (148)..(157): n is a, c, g, or t
cttggctttatatatcttgtggaaaggacgaaacaccgtaatttctactaagtgtagattaacgcgcaacacgccaatgtaatttctactaagtgtagatcgaccgaggttacgctgggataatttctactaagtgtagatttttttnnnnnnnnnnaagcttggcgtggatccgatatcaactagatcttgagacaaatggcagtattcatccacaattttaaaagaaaaggggggattggggggtacagtgcaggggaaagaatagtagacataatagcaacagacatacaaactaaag

SEQ ID NO: 21390 - DNA, 301 bp, Artificial Sequence
  NTC.51_NTC.46
  crRNA array
  misc_feature (148)..(157): n is a, c, g, or t
cttggctttatatatcttgtggaaaggacgaaacaccgtaatttctactaagtgtagattaacgcgcaacacgccaatgtaatttctactaagtgtagatagcgggtcgtagacgcgcggtaatttctactaagtgtagatttttttnnnnnnnnnnaagcttggcgtggatccgatatcaactagatcttgagacaaatggcagtattcatccacaattttaaaagaaaaggggggattggggggtacagtgcaggggaaagaatagtagacataatagcaacagacatacaaactaaag

SEQ ID NO: 21391 - DNA, 301 bp, Artificial Sequence
  NTC.51_NTC.35
  crRNA array
  misc_feature (148)..(157): n is a, c, g, or t
cttggctttatatatcttgtggaaaggacgaaacaccgtaatttctactaagtgtagattaacgcgcaacacgccaatgtaatttctactaagtgtagattggcgcgtaatcgctattcgtaatttctactaagtgtagatttttttnnnnnnnnnnaagcttggcgtggatccgatatcaactagatcttgagacaaatggcagtattcatccacaattttaaaagaaaaggggggattggggggtacagtgcaggggaaagaatagtagacataatagcaacagacatacaaactaaag

SEQ ID NO: 21392 - DNA, 301 bp, Artificial Sequence
  NTC.51_NTC.10
  crRNA array
  misc_feature (148)..(157): n is a, c, g, or t
cttggctttatatatcttgtggaaaggacgaaacaccgtaatttctactaagtgtagattaacgcgcaacacgccaatgtaatttctactaagtgtagatcgctaagttcgcgcgggccgtaatttctactaagtgtagatttttttnnnnnnnnnnaagcttggcgtggatccgatatcaactagatcttgagacaaatggcagtattcatccacaattttaaaagaaaaggggggattggggggtacagtgcaggggaaagaatagtagacataatagcaacagacatacaaactaaag

SEQ ID NO: 21393 - DNA, 301 bp, Artificial Sequence
  NTC.51_NTC.11
  crRNA array
  misc_feature (148)..(157): n is a, c, g, or t
cttggctttatatatcttgtggaaaggacgaaacaccgtaatttctactaagtgtagattaacgcgcaacacgccaatgtaatttctactaagtgtagatcgttcgtcgacgaagcaatctaatttctactaagtgtagatttttttnnnnnnnnnnaagcttggcgtggatccgatatcaactagatcttgagacaaatggcagtattcatccacaattttaaaagaaaaggggggattggggggtacagtgcaggggaaagaatagtagacataatagcaacagacatacaaactaaag

SEQ ID NO: 21394 - DNA, 301 bp, Artificial Sequence
  NTC.51_NTC.14
  crRNA array
  misc_feature (148)..(157): n is a, c, g, or t
cttggctttatatatcttgtggaaaggacgaaacaccgtaatttctactaagtgtagattaacgcgcaacacgccaatgtaatttctactaagtgtagatccgttcgtgcgatagtgttttaatttctactaagtgtagatttttttnnnnnnnnnnaagcttggcgtggatccgatatcaactagatcttgagacaaatggcagtattcatccacaattttaaaagaaaaggggggattggggggtacagtgcaggggaaagaatagtagacataatagcaacagacatacaaactaaag

SEQ ID NO: 21395 - DNA, 301 bp, Artificial Sequence
  NTC.51_NTC.28
  crRNA array
  misc_feature (148)..(157): n is a, c, g, or t
cttggctttatatatcttgtggaaaggacgaaacaccgtaatttctactaagtgtagattaacgcgcaacacgccaatgtaatttctactaagtgtagataccgctaatcggcgtaaacttaatttctactaagtgtagatttttttnnnnnnnnnnaagcttggcgtggatccgatatcaactagatcttgagacaaatggcagtattcatccacaattttaaaagaaaaggggggattggggggtacagtgcaggggaaagaatagtagacataatagcaacagacatacaaactaaag

SEQ ID NO: 21396 - DNA, 301 bp, Artificial Sequence
  NTC.23_NTC.36
  crRNA array
  misc_feature (148)..(157): n is a, c, g, or t
cttggctttatatatcttgtggaaaggacgaaacaccgtaatttctactaagtgtagatacgcgctattatcgtaggtgtaatttctactaagtgtagatcaacccgccgtagcgggccttaatttctactaagtgtagatttttttnnnnnnnnnnaagcttggcgtggatccgatatcaactagatcttgagacaaatggcagtattcatccacaattttaaaagaaaaggggggattggggggtacagtgcaggggaaagaatagtagacataatagcaacagacatacaaactaaag

SEQ ID NO: 21397 - DNA, 301 bp, Artificial Sequence
  NTC.23_NTC.15
  crRNA array
  misc_feature (148)..(157): n is a, c, g, or t
cttggctttatatatcttgtggaaaggacgaaacaccgtaatttctactaagtgtagatacgcgctattatcgtaggtgtaatttctactaagtgtagatgttgtcgtgccgcgaatttataatttctactaagtgtagatttttttnnnnnnnnnnaagcttggcgtggatccgatatcaactagatcttgagacaaatggcagtattcatccacaattttaaaagaaaaggggggattggggggtacagtgcaggggaaagaatagtagacataatagcaacagacatacaaactaaag

SEQ ID NO: 21398 - DNA, 301 bp, Artificial Sequence
  NTC.23_NTC.45
  crRNA array
  misc_feature (148)..(157): n is a, c, g, or t
cttggctttatatatcttgtggaaaggacgaaacaccgtaatttctactaagtgtagatacgcgctattatcgtaggtgtaatttctactaagtgtagatcggaacgcgtgatactagggtaatttctactaagtgtagatttttttnnnnnnnnnnaagcttggcgtggatccgatatcaactagatcttgagacaaatggcagtattcatccacaattttaaaagaaaaggggggattggggggtacagtgcaggggaaagaatagtagacataatagcaacagacatacaaactaaag

SEQ ID NO: 21399 - DNA, 301 bp, Artificial Sequence
  NTC.23_NTC.12
  crRNA array
  misc_feature (148)..(157): n is a, c, g, or t
cttggctttatatatcttgtggaaaggacgaaacaccgtaatttctactaagtgtagatacgcgctattatcgtaggtgtaatttctactaagtgtagatcgccgacgattaatcaatagtaatttctactaagtgtagatttttttnnnnnnnnnnaagcttggcgtggatccgatatcaactagatcttgagacaaatggcagtattcatccacaattttaaaagaaaaggggggattggggggtacagtgcaggggaaagaatagtagacataatagcaacagacatacaaactaaag

SEQ ID NO: 21400 - DNA, 301 bp, Artificial Sequence
  NTC.23_NTC.19
  crRNA array
  misc_feature (148)..(157): n is a, c, g, or t
cttggctttatatatcttgtggaaaggacgaaacaccgtaatttctactaagtgtagatacgcgctattatcgtaggtgtaatttctactaagtgtagatcgtcgtagaacgatacccgataatttctactaagtgtagatttttttnnnnnnnnnnaagcttggcgtggatccgatatcaactagatcttgagacaaatggcagtattcatccacaattttaaaagaaaaggggggattggggggtacagtgcaggggaaagaatagtagacataatagcaacagacatacaaactaaag

SEQ ID NO: 21401 - DNA, 301 bp, Artificial Sequence
  NTC.23_NTC.20
  crRNA array
  misc_feature (148)..(157): n is a, c, g, or t
cttggctttatatatcttgtggaaaggacgaaacaccgtaatttctactaagtgtagatacgcgctattatcgtaggtgtaatttctactaagtgtagatattccggcgcgaccagaagataatttctactaagtgtagatttttttnnnnnnnnnnaagcttggcgtggatccgatatcaactagatcttgagacaaatggcagtattcatccacaattttaaaagaaaaggggggattggggggtacagtgcaggggaaagaatagtagacataatagcaacagacatacaaactaaag

SEQ ID NO: 21402 - DNA, 301 bp, Artificial Sequence
  NTC.23_NTC.48
  crRNA array
  misc_feature (148)..(157): n is a, c, g, or t
cttggctttatatatcttgtggaaaggacgaaacaccgtaatttctactaagtgtagatacgcgctattatcgtaggtgtaatttctactaagtgtagatcggtcgactacggctgttagtaatttctactaagtgtagatttttttnnnnnnnnnnaagcttggcgtggatccgatatcaactagatcttgagacaaatggcagtattcatccacaattttaaaagaaaaggggggattggggggtacagtgcaggggaaagaatagtagacataatagcaacagacatacaaactaaag

SEQ ID NO: 21403 - DNA, 301 bp, Artificial Sequence
  NTC.23_NTC.26
  crRNA array
  misc_feature (148)..(157): n is a, c, g, or t
cttggctttatatatcttgtggaaaggacgaaacaccgtaatttctactaagtgtagatacgcgctattatcgtaggtgtaatttctactaagtgtagatcgcgacggcggttttaacactaatttctactaagtgtagatttttttnnnnnnnnnnaagcttggcgtggatccgatatcaactagatcttgagacaaatggcagtattcatccacaattttaaaagaaaaggggggattggggggtacagtgcaggggaaagaatagtagacataatagcaacagacatacaaactaaag

SEQ ID NO: 21404 - DNA, 301 bp, Artificial Sequence
  NTC.23_NTC.27
  crRNA array
  misc_feature (148)..(157): n is a, c, g, or t
cttggctttatatatcttgtggaaaggacgaaacaccgtaatttctactaagtgtagatacgcgctattatcgtaggtgtaatttctactaagtgtagatgtcgcgttgcgaccggcgcttaatttctactaagtgtagatttttttnnnnnnnnnnaagcttggcgtggatccgatatcaactagatcttgagacaaatggcagtattcatccacaattttaaaagaaaaggggggattggggggtacagtgcaggggaaagaatagtagacataatagcaacagacatacaaactaaag

SEQ ID NO: 21405 - DNA, 301 bp, Artificial Sequence
  NTC.23_NTC.34
  crRNA array
  misc_feature (148)..(157): n is a, c, g, or t
cttggctttatatatcttgtggaaaggacgaaacaccgtaatttctactaagtgtagatacgcgctattatcgtaggtgtaatttctactaagtgtagattagcgttcgacacgtgaaactaatttctactaagtgtagatttttttnnnnnnnnnnaagcttggcgtggatccgatatcaactagatcttgagacaaatggcagtattcatccacaattttaaaagaaaaggggggattggggggtacagtgcaggggaaagaatagtagacataatagcaacagacatacaaactaaag

SEQ ID NO: 21406 - DNA, 301 bp, Artificial Sequence
  NTC.23_NTC.16
  crRNA array
  misc_feature (148)..(157): n is a, c, g, or t
cttggctttatatatcttgtggaaaggacgaaacaccgtaatttctactaagtgtagatacgcgctattatcgtaggtgtaatttctactaagtgtagatcggtacgttagacgaaaatttaatttctactaagtgtagatttttttnnnnnnnnnnaagcttggcgtggatccgatatcaactagatcttgagacaaatggcagtattcatccacaattttaaaagaaaaggggggattggggggtacagtgcaggggaaagaatagtagacataatagcaacagacatacaaactaaag

SEQ ID NO: 21407 - DNA, 301 bp, Artificial Sequence
  NTC.23_NTC.4
  crRNA array
  misc_feature (148)..(157): n is a, c, g, or t
cttggctttatatatcttgtggaaaggacgaaacaccgtaatttctactaagtgtagatacgcgctattatcgtaggtgtaatttctactaagtgtagatatacccgtcgcgaacgtgagtaatttctactaagtgtagatttttttnnnnnnnnnnaagcttggcgtggatccgatatcaactagatcttgagacaaatggcagtattcatccacaattttaaaagaaaaggggggattggggggtacagtgcaggggaaagaatagtagacataatagcaacagacatacaaactaaag

SEQ ID NO: 21408 - DNA, 301 bp, Artificial Sequence
  NTC.23_NTC.42
  crRNA array
  misc_feature (148)..(157): n is a, c, g, or t
cttggctttatatatcttgtggaaaggacgaaacaccgtaatttctactaagtgtagatacgcgctattatcgtaggtgtaatttctactaagtgtagatggtcaaatcgcggcgataactaatttctactaagtgtagatttttttnnnnnnnnnnaagcttggcgtggatccgatatcaactagatcttgagacaaatggcagtattcatccacaattttaaaagaaaaggggggattggggggtacagtgcaggggaaagaatagtagacataatagcaacagacatacaaactaaag

SEQ ID NO: 21409 - DNA, 301 bp, Artificial Sequence
  NTC.23_NTC.22
  crRNA array
  misc_feature (148)..(157): n is a, c, g, or t
cttggctttatatatcttgtggaaaggacgaaacaccgtaatttctactaagtgtagatacgcgctattatcgtaggtgtaatttctactaagtgtagatgcgcgtcaacgtaatgtgcctaatttctactaagtgtagatttttttnnnnnnnnnnaagcttggcgtggatccgatatcaactagatcttgagacaaatggcagtattcatccacaattttaaaagaaaaggggggattggggggtacagtgcaggggaaagaatagtagacataatagcaacagacatacaaactaaag

SEQ ID NO: 21410 - DNA, 301 bp, Artificial Sequence
  NTC.23_NTC.17
  crRNA array
  misc_feature (148)..(157): n is a, c, g, or t
cttggctttatatatcttgtggaaaggacgaaacaccgtaatttctactaagtgtagatacgcgctattatcgtaggtgtaatttctactaagtgtagattatcgaacgctatcgaacgttaatttctactaagtgtagatttttttnnnnnnnnnnaagcttggcgtggatccgatatcaactagatcttgagacaaatggcagtattcatccacaattttaaaagaaaaggggggattggggggtacagtgcaggggaaagaatagtagacataatagcaacagacatacaaactaaag

SEQ ID NO: 21411 - DNA, 301 bp, Artificial Sequence
  NTC.23_NTC.9
  crRNA array
  misc_feature (148)..(157): n is a, c, g, or t
cttggctttatatatcttgtggaaaggacgaaacaccgtaatttctactaagtgtagatacgcgctattatcgtaggtgtaatttctactaagtgtagatatcgccgtacggctatggcataatttctactaagtgtagatttttttnnnnnnnnnnaagcttggcgtggatccgatatcaactagatcttgagacaaatggcagtattcatccacaattttaaaagaaaaggggggattggggggtacagtgcaggggaaagaatagtagacataatagcaacagacatacaaactaaag

SEQ ID NO: 21412 - DNA, 301 bp, Artificial Sequence
  NTC.23_NTC.30
  crRNA array
  misc_feature (148)..(157): n is a, c, g, or t
cttggctttatatatcttgtggaaaggacgaaacaccgtaatttctactaagtgtagatacgcgctattatcgtaggtgtaatttctactaagtgtagatcgatcgtacgggtgtcctaataatttctactaagtgtagatttttttnnnnnnnnnnaagcttggcgtggatccgatatcaactagatcttgagacaaatggcagtattcatccacaattttaaaagaaaaggggggattggggggtacagtgcaggggaaagaatagtagacataatagcaacagacatacaaactaaag

SEQ ID NO: 21413 - DNA, 301 bp, Artificial Sequence
  NTC.23_NTC.8
  crRNA array
  misc_feature (148)..(157): n is a, c, g, or t
cttggctttatatatcttgtggaaaggacgaaacaccgtaatttctactaagtgtagatacgcgctattatcgtaggtgtaatttctactaagtgtagatcgaccgaggttacgctgggataatttctactaagtgtagatttttttnnnnnnnnnnaagcttggcgtggatccgatatcaactagatcttgagacaaatggcagtattcatccacaattttaaaagaaaaggggggattggggggtacagtgcaggggaaagaatagtagacataatagcaacagacatacaaactaaag

SEQ ID NO: 21414 - DNA, 301 bp, Artificial Sequence
  NTC.23_NTC.46
  crRNA array
  misc_feature (148)..(157): n is a, c, g, or t
cttggctttatatatcttgtggaaaggacgaaacaccgtaatttctactaagtgtagatacgcgctattatcgtaggtgtaatttctactaagtgtagatagcgggtcgtagacgcgcggtaatttctactaagtgtagatttttttnnnnnnnnnnaagcttggcgtggatccgatatcaactagatcttgagacaaatggcagtattcatccacaattttaaaagaaaaggggggattggggggtacagtgcaggggaaagaatagtagacataatagcaacagacatacaaactaaag

SEQ ID NO: 21415 - DNA, 301 bp, Artificial Sequence
  NTC.23_NTC.35
  crRNA array
  misc_feature (148)..(157): n is a, c, g, or t
cttggctttatatatcttgtggaaaggacgaaacaccgtaatttctactaagtgtagatacgcgctattatcgtaggtgtaatttctactaagtgtagattggcgcgtaatcgctattcgtaatttctactaagtgtagatttttttnnnnnnnnnnaagcttggcgtggatccgatatcaactagatcttgagacaaatggcagtattcatccacaattttaaaagaaaaggggggattggggggtacagtgcaggggaaagaatagtagacataatagcaacagacatacaaactaaag

SEQ ID NO: 21416 - DNA, 301 bp, Artificial Sequence
  NTC.23_NTC.10
  crRNA array
  misc_feature (148)..(157): n is a, c, g, or t
cttggctttatatatcttgtggaaaggacgaaacaccgtaatttctactaagtgtagatacgcgctattatcgtaggtgtaatttctactaagtgtagatcgctaagttcgcgcgggccgtaatttctactaagtgtagatttttttnnnnnnnnnnaagcttggcgtggatccgatatcaactagatcttgagacaaatggcagtattcatccacaattttaaaagaaaaggggggattggggggtacagtgcaggggaaagaatagtagacataatagcaacagacatacaaactaaag

SEQ ID NO: 21417 - DNA, 301 bp, Artificial Sequence
  NTC.23_NTC.11
  crRNA array
  misc_feature (148)..(157): n is a, c, g, or t
cttggctttatatatcttgtggaaaggacgaaacaccgtaatttctactaagtgtagatacgcgctattatcgtaggtgtaatttctactaagtgtagatcgttcgtcgacgaagcaatctaatttctactaagtgtagatttttttnnnnnnnnnnaagcttggcgtggatccgatatcaactagatcttgagacaaatggcagtattcatccacaattttaaaagaaaaggggggattggggggtacagtgcaggggaaagaatagtagacataatagcaacagacatacaaactaaag

SEQ ID NO: 21418 - DNA, 301 bp, Artificial Sequence
  NTC.23_NTC.14
  crRNA array
  misc_feature (148)..(157): n is a, c, g, or t
cttggctttatatatcttgtggaaaggacgaaacaccgtaatttctactaagtgtagatacgcgctattatcgtaggtgtaatttctactaagtgtagatccgttcgtgcgatagtgttttaatttctactaagtgtagatttttttnnnnnnnnnnaagcttggcgtggatccgatatcaactagatcttgagacaaatggcagtattcatccacaattttaaaagaaaaggggggattggggggtacagtgcaggggaaagaatagtagacataatagcaacagacatacaaactaaag

SEQ ID NO: 21419 - DNA, 301 bp, Artificial Sequence
  NTC.23_NTC.28
  crRNA array
  misc_feature (148)..(157): n is a, c, g, or t
cttggctttatatatcttgtggaaaggacgaaacaccgtaatttctactaagtgtagatacgcgctattatcgtaggtgtaatttctactaagtgtagataccgctaatcggcgtaaacttaatttctactaagtgtagatttttttnnnnnnnnnnaagcttggcgtggatccgatatcaactagatcttgagacaaatggcagtattcatccacaattttaaaagaaaaggggggattggggggtacagtgcaggggaaagaatagtagacataatagcaacagacatacaaactaaag

SEQ ID NO: 21420 - DNA, 301 bp, Artificial Sequence
  NTC.36_NTC.15
  crRNA array
  misc_feature (148)..(157): n is a, c, g, or t
cttggctttatatatcttgtggaaaggacgaaacaccgtaatttctactaagtgtagatcaacccgccgtagcgggccttaatttctactaagtgtagatgttgtcgtgccgcgaatttataatttctactaagtgtagatttttttnnnnnnnnnnaagcttggcgtggatccgatatcaactagatcttgagacaaatggcagtattcatccacaattttaaaagaaaaggggggattggggggtacagtgcaggggaaagaatagtagacataatagcaacagacatacaaactaaag

SEQ ID NO: 21421 - DNA, 301 bp, Artificial Sequence
  NTC.36_NTC.45
  crRNA array
  misc_feature (148)..(157): n is a, c, g, or t
cttggctttatatatcttgtggaaaggacgaaacaccgtaatttctactaagtgtagatcaacccgccgtagcgggccttaatttctactaagtgtagatcggaacgcgtgatactagggtaatttctactaagtgtagatttttttnnnnnnnnnnaagcttggcgtggatccgatatcaactagatcttgagacaaatggcagtattcatccacaattttaaaagaaaaggggggattggggggtacagtgcaggggaaagaatagtagacataatagcaacagacatacaaactaaag

SEQ ID NO: 21422 - DNA, 301 bp, Artificial Sequence
  NTC.36_NTC.12
  crRNA array
  misc_feature (148)..(157): n is a, c, g, or t
cttggctttatatatcttgtggaaaggacgaaacaccgtaatttctactaagtgtagatcaacccgccgtagcgggccttaatttctactaagtgtagatcgccgacgattaatcaatagtaatttctactaagtgtagatttttttnnnnnnnnnnaagcttggcgtggatccgatatcaactagatcttgagacaaatggcagtattcatccacaattttaaaagaaaaggggggattggggggtacagtgcaggggaaagaatagtagacataatagcaacagacatacaaactaaag

SEQ ID NO: 21423 - DNA, 301 bp, Artificial Sequence
  NTC.36_NTC.19
  crRNA array
  misc_feature (148)..(157): n is a, c, g, or t
cttggctttatatatcttgtggaaaggacgaaacaccgtaatttctactaagtgtagatcaacccgccgtagcgggccttaatttctactaagtgtagatcgtcgtagaacgatacccgataatttctactaagtgtagatttttttnnnnnnnnnnaagcttggcgtggatccgatatcaactagatcttgagacaaatggcagtattcatccacaattttaaaagaaaaggggggattggggggtacagtgcaggggaaagaatagtagacataatagcaacagacatacaaactaaag

SEQ ID NO: 21424 - DNA, 301 bp, Artificial Sequence
  NTC.36_NTC.20
  crRNA array
  misc_feature (148)..(157): n is a, c, g, or t
cttggctttatatatcttgtggaaaggacgaaacaccgtaatttctactaagtgtagatcaacccgccgtagcgggccttaatttctactaagtgtagatattccggcgcgaccagaagataatttctactaagtgtagatttttttnnnnnnnnnnaagcttggcgtggatccgatatcaactagatcttgagacaaatggcagtattcatccacaattttaaaagaaaaggggggattggggggtacagtgcaggggaaagaatagtagacataatagcaacagacatacaaactaaag

SEQ ID NO: 21425 - DNA, 301 bp, Artificial Sequence
  NTC.36_NTC.48
  crRNA array
  misc_feature (148)..(157): n is a, c, g, or t
cttggctttatatatcttgtggaaaggacgaaacaccgtaatttctactaagtgtagatcaacccgccgtagcgggccttaatttctactaagtgtagatcggtcgactacggctgttagtaatttctactaagtgtagatttttttnnnnnnnnnnaagcttggcgtggatccgatatcaactagatcttgagacaaatggcagtattcatccacaattttaaaagaaaaggggggattggggggtacagtgcaggggaaagaatagtagacataatagcaacagacatacaaactaaag

SEQ ID NO: 21426 - DNA, 301 bp, Artificial Sequence
  NTC.36_NTC.26
  crRNA array
  misc_feature (148)..(157): n is a, c, g, or t
cttggctttatatatcttgtggaaaggacgaaacaccgtaatttctactaagtgtagatcaacccgccgtagcgggccttaatttctactaagtgtagatcgcgacggcggttttaacactaatttctactaagtgtagatttttttnnnnnnnnnnaagcttggcgtggatccgatatcaactagatcttgagacaaatggcagtattcatccacaattttaaaagaaaaggggggattggggggtacagtgcaggggaaagaatagtagacataatagcaacagacatacaaactaaag

SEQ ID NO: 21427 - DNA, 301 bp, Artificial Sequence
  NTC.36_NTC.27
  crRNA array
  misc_feature (148)..(157): n is a, c, g, or t
cttggctttatatatcttgtggaaaggacgaaacaccgtaatttctactaagtgtagatcaacccgccgtagcgggccttaatttctactaagtgtagatgtcgcgttgcgaccggcgcttaatttctactaagtgtagatttttttnnnnnnnnnnaagcttggcgtggatccgatatcaactagatcttgagacaaatggcagtattcatccacaattttaaaagaaaaggggggattggggggtacagtgcaggggaaagaatagtagacataatagcaacagacatacaaactaaag

SEQ ID NO: 21428 - DNA, 301 bp, Artificial Sequence
  NTC.36_NTC.34
  crRNA array
  misc_feature (148)..(157): n is a, c, g, or t
cttggctttatatatcttgtggaaaggacgaaacaccgtaatttctactaagtgtagatcaacccgccgtagcgggccttaatttctactaagtgtagattagcgttcgacacgtgaaactaatttctactaagtgtagatttttttnnnnnnnnnnaagcttggcgtggatccgatatcaactagatcttgagacaaatggcagtattcatccacaattttaaaagaaaaggggggattggggggtacagtgcaggggaaagaatagtagacataatagcaacagacatacaaactaaag

SEQ ID NO: 21429 - DNA, 301 bp, Artificial Sequence
  NTC.36_NTC.16
  crRNA array
  misc_feature (148)..(157): n is a, c, g, or t
cttggctttatatatcttgtggaaaggacgaaacaccgtaatttctactaagtgtagatcaacccgccgtagcgggccttaatttctactaagtgtagatcggtacgttagacgaaaatttaatttctactaagtgtagatttttttnnnnnnnnnnaagcttggcgtggatccgatatcaactagatcttgagacaaatggcagtattcatccacaattttaaaagaaaaggggggattggggggtacagtgcaggggaaagaatagtagacataatagcaacagacatacaaactaaag

SEQ ID NO: 21430 - DNA, 301 bp, Artificial Sequence
  NTC.36_NTC.4
  crRNA array
  misc_feature (148)..(157): n is a, c, g, or t
cttggctttatatatcttgtggaaaggacgaaacaccgtaatttctactaagtgtagatcaacccgccgtagcgggccttaatttctactaagtgtagatatacccgtcgcgaacgtgagtaatttctactaagtgtagatttttttnnnnnnnnnnaagcttggcgtggatccgatatcaactagatcttgagacaaatggcagtattcatccacaattttaaaagaaaaggggggattggggggtacagtgcaggggaaagaatagtagacataatagcaacagacatacaaactaaag

SEQ ID NO: 21431 - DNA, 301 bp, Artificial Sequence
  NTC.36_NTC.42
  crRNA array
  misc_feature (148)..(157): n is a, c, g, or t
cttggctttatatatcttgtggaaaggacgaaacaccgtaatttctactaagtgtagatcaacccgccgtagcgggccttaatttctactaagtgtagatggtcaaatcgcggcgataactaatttctactaagtgtagatttttttnnnnnnnnnnaagcttggcgtggatccgatatcaactagatcttgagacaaatggcagtattcatccacaattttaaaagaaaaggggggattggggggtacagtgcaggggaaagaatagtagacataatagcaacagacatacaaactaaag

SEQ ID NO: 21432 - DNA, 301 bp, Artificial Sequence
  NTC.36_NTC.22
  crRNA array
  misc_feature (148)..(157): n is a, c, g, or t
cttggctttatatatcttgtggaaaggacgaaacaccgtaatttctactaagtgtagatcaacccgccgtagcgggccttaatttctactaagtgtagatgcgcgtcaacgtaatgtgcctaatttctactaagtgtagatttttttnnnnnnnnnnaagcttggcgtggatccgatatcaactagatcttgagacaaatggcagtattcatccacaattttaaaagaaaaggggggattggggggtacagtgcaggggaaagaatagtagacataatagcaacagacatacaaactaaag

SEQ ID NO: 21433 - DNA, 301 bp, Artificial Sequence
  NTC.36_NTC.17
  crRNA array
  misc_feature (148)..(157): n is a, c, g, or t
cttggctttatatatcttgtggaaaggacgaaacaccgtaatttctactaagtgtagatcaacccgccgtagcgggccttaatttctactaagtgtagattatcgaacgctatcgaacgttaatttctactaagtgtagatttttttnnnnnnnnnnaagcttggcgtggatccgatatcaactagatcttgagacaaatggcagtattcatccacaattttaaaagaaaaggggggattggggggtacagtgcaggggaaagaatagtagacataatagcaacagacatacaaactaaag

SEQ ID NO: 21434 - DNA, 301 bp, Artificial Sequence
  NTC.36_NTC.9
  crRNA array
  misc_feature (148)..(157): n is a, c, g, or t
cttggctttatatatcttgtggaaaggacgaaacaccgtaatttctactaagtgtagatcaacccgccgtagcgggccttaatttctactaagtgtagatatcgccgtacggctatggcataatttctactaagtgtagatttttttnnnnnnnnnnaagcttggcgtggatccgatatcaactagatcttgagacaaatggcagtattcatccacaattttaaaagaaaaggggggattggggggtacagtgcaggggaaagaatagtagacataatagcaacagacatacaaactaaag

SEQ ID NO: 21435 - DNA, 301 bp, Artificial Sequence
  NTC.36_NTC.30
  crRNA array
  misc_feature (148)..(157): n is a, c, g, or t
cttggctttatatatcttgtggaaaggacgaaacaccgtaatttctactaagtgtagatcaacccgccgtagcgggccttaatttctactaagtgtagatcgatcgtacgggtgtcctaataatttctactaagtgtagatttttttnnnnnnnnnnaagcttggcgtggatccgatatcaactagatcttgagacaaatggcagtattcatccacaattttaaaagaaaaggggggattggggggtacagtgcaggggaaagaatagtagacataatagcaacagacatacaaactaaag

SEQ ID NO: 21436 - DNA, 301 bp, Artificial Sequence
  NTC.36_NTC.8
  crRNA array
  misc_feature (148)..(157): n is a, c, g, or t
cttggctttatatatcttgtggaaaggacgaaacaccgtaatttctactaagtgtagatcaacccgccgtagcgggccttaatttctactaagtgtagatcgaccgaggttacgctgggataatttctactaagtgtagatttttttnnnnnnnnnnaagcttggcgtggatccgatatcaactagatcttgagacaaatggcagtattcatccacaattttaaaagaaaaggggggattggggggtacagtgcaggggaaagaatagtagacataatagcaacagacatacaaactaaag

SEQ ID NO: 21437 - DNA, 301 bp, Artificial Sequence
  NTC.36_NTC.46
  crRNA array
  misc_feature (148)..(157): n is a, c, g, or t
cttggctttatatatcttgtggaaaggacgaaacaccgtaatttctactaagtgtagatcaacccgccgtagcgggccttaatttctactaagtgtagatagcgggtcgtagacgcgcggtaatttctactaagtgtagatttttttnnnnnnnnnnaagcttggcgtggatccgatatcaactagatcttgagacaaatggcagtattcatccacaattttaaaagaaaaggggggattggggggtacagtgcaggggaaagaatagtagacataatagcaacagacatacaaactaaag

SEQ ID NO: 21438 - DNA, 301 bp, Artificial Sequence
  NTC.36_NTC.35
  crRNA array
  misc_feature (148)..(157): n is a, c, g, or t
cttggctttatatatcttgtggaaaggacgaaacaccgtaatttctactaagtgtagatcaacccgccgtagcgggccttaatttctactaagtgtagattggcgcgtaatcgctattcgtaatttctactaagtgtagatttttttnnnnnnnnnnaagcttggcgtggatccgatatcaactagatcttgagacaaatggcagtattcatccacaattttaaaagaaaaggggggattggggggtacagtgcaggggaaagaatagtagacataatagcaacagacatacaaactaaag

SEQ ID NO: 21439 - DNA, 301 bp, Artificial Sequence
  NTC.36_NTC.10
  crRNA array
  misc_feature (148)..(157): n is a, c, g, or t
cttggctttatatatcttgtggaaaggacgaaacaccgtaatttctactaagtgtagatcaacccgccgtagcgggccttaatttctactaagtgtagatcgctaagttcgcgcgggccgtaatttctactaagtgtagatttttttnnnnnnnnnnaagcttggcgtggatccgatatcaactagatcttgagacaaatggcagtattcatccacaattttaaaagaaaaggggggattggggggtacagtgcaggggaaagaatagtagacataatagcaacagacatacaaactaaag

SEQ ID NO: 21440 - DNA, 301 bp, Artificial Sequence
  NTC.36_NTC.11
  crRNA array
  misc_feature (148)..(157): n is a, c, g, or t
cttggctttatatatcttgtggaaaggacgaaacaccgtaatttctactaagtgtagatcaacccgccgtagcgggccttaatttctactaagtgtagatcgttcgtcgacgaagcaatctaatttctactaagtgtagatttttttnnnnnnnnnnaagcttggcgtggatccgatatcaactagatcttgagacaaatggcagtattcatccacaattttaaaagaaaaggggggattggggggtacagtgcaggggaaagaatagtagacataatagcaacagacatacaaactaaag

SEQ ID NO: 21441 - DNA, 301 bp, Artificial Sequence
  NTC.36_NTC.14
  crRNA array
  misc_feature (148)..(157): n is a, c, g, or t
cttggctttatatatcttgtggaaaggacgaaacaccgtaatttctactaagtgtagatcaacccgccgtagcgggccttaatttctactaagtgtagatccgttcgtgcgatagtgttttaatttctactaagtgtagatttttttnnnnnnnnnnaagcttggcgtggatccgatatcaactagatcttgagacaaatggcagtattcatccacaattttaaaagaaaaggggggattggggggtacagtgcaggggaaagaatagtagacataatagcaacagacatacaaactaaag

SEQ ID NO: 21442 - DNA, 301 bp, Artificial Sequence
  NTC.36_NTC.28
  crRNA array
  misc_feature (148)..(157): n is a, c, g, or t
cttggctttatatatcttgtggaaaggacgaaacaccgtaatttctactaagtgtagatcaacccgccgtagcgggccttaatttctactaagtgtagataccgctaatcggcgtaaacttaatttctactaagtgtagatttttttnnnnnnnnnnaagcttggcgtggatccgatatcaactagatcttgagacaaatggcagtattcatccacaattttaaaagaaaaggggggattggggggtacagtgcaggggaaagaatagtagacataatagcaacagacatacaaactaaag

SEQ ID NO: 21443 - DNA, 301 bp, Artificial Sequence
  NTC.15_NTC.45
  crRNA array
  misc_feature (148)..(157): n is a, c, g, or t
cttggctttatatatcttgtggaaaggacgaaacaccgtaatttctactaagtgtagatgttgtcgtgccgcgaatttataatttctactaagtgtagatcggaacgcgtgatactagggtaatttctactaagtgtagatttttttnnnnnnnnnnaagcttggcgtggatccgatatcaactagatcttgagacaaatggcagtattcatccacaattttaaaagaaaaggggggattggggggtacagtgcaggggaaagaatagtagacataatagcaacagacatacaaactaaag

SEQ ID NO: 21444 - DNA, 301 bp, Artificial Sequence
  NTC.15_NTC.12
  crRNA array
  misc_feature (148)..(157): n is a, c, g, or t
cttggctttatatatcttgtggaaaggacgaaacaccgtaatttctactaagtgtagatgttgtcgtgccgcgaatttataatttctactaagtgtagatcgccgacgattaatcaatagtaatttctactaagtgtagatttttttnnnnnnnnnnaagcttggcgtggatccgatatcaactagatcttgagacaaatggcagtattcatccacaattttaaaagaaaaggggggattggggggtacagtgcaggggaaagaatagtagacataatagcaacagacatacaaactaaag

SEQ ID NO: 21445 - DNA, 301 bp, Artificial Sequence
  NTC.15_NTC.19
  crRNA array
  misc_feature (148)..(157): n is a, c, g, or t
cttggctttatatatcttgtggaaaggacgaaacaccgtaatttctactaagtgtagatgttgtcgtgccgcgaatttataatttctactaagtgtagatcgtcgtagaacgatacccgataatttctactaagtgtagatttttttnnnnnnnnnnaagcttggcgtggatccgatatcaactagatcttgagacaaatggcagtattcatccacaattttaaaagaaaaggggggattggggggtacagtgcaggggaaagaatagtagacataatagcaacagacatacaaactaaag

SEQ ID NO: 21446 - DNA, 301 bp, Artificial Sequence
  NTC.15_NTC.20
  crRNA array
  misc_feature (148)..(157): n is a, c, g, or t
cttggctttatatatcttgtggaaaggacgaaacaccgtaatttctactaagtgtagatgttgtcgtgccgcgaatttataatttctactaagtgtagatattccggcgcgaccagaagataatttctactaagtgtagatttttttnnnnnnnnnnaagcttggcgtggatccgatatcaactagatcttgagacaaatggcagtattcatccacaattttaaaagaaaaggggggattggggggtacagtgcaggggaaagaatagtagacataatagcaacagacatacaaactaaag

SEQ ID NO: 21447 - DNA, 301 bp, Artificial Sequence
  NTC.15_NTC.48
  crRNA array
  misc_feature (148)..(157): n is a, c, g, or t
cttggctttatatatcttgtggaaaggacgaaacaccgtaatttctactaagtgtagatgttgtcgtgccgcgaatttataatttctactaagtgtagatcggtcgactacggctgttagtaatttctactaagtgtagatttttttnnnnnnnnnnaagcttggcgtggatccgatatcaactagatcttgagacaaatggcagtattcatccacaattttaaaagaaaaggggggattggggggtacagtgcaggggaaagaatagtagacataatagcaacagacatacaaactaaag

SEQ ID NO: 21448 - DNA, 301 bp, Artificial Sequence
  NTC.15_NTC.26
  crRNA array
  misc_feature (148)..(157): n is a, c, g, or t
cttggctttatatatcttgtggaaaggacgaaacaccgtaatttctactaagtgtagatgttgtcgtgccgcgaatttataatttctactaagtgtagatcgcgacggcggttttaacactaatttctactaagtgtagatttttttnnnnnnnnnnaagcttggcgtggatccgatatcaactagatcttgagacaaatggcagtattcatccacaattttaaaagaaaaggggggattggggggtacagtgcaggggaaagaatagtagacataatagcaacagacatacaaactaaag

SEQ ID NO: 21449 - DNA, 301 bp, Artificial Sequence
  NTC.15_NTC.27
  crRNA array
  misc_feature (148)..(157): n is a, c, g, or t
cttggctttatatatcttgtggaaaggacgaaacaccgtaatttctactaagtgtagatgttgtcgtgccgcgaatttataatttctactaagtgtagatgtcgcgttgcgaccggcgcttaatttctactaagtgtagatttttttnnnnnnnnnnaagcttggcgtggatccgatatcaactagatcttgagacaaatggcagtattcatccacaattttaaaagaaaaggggggattggggggtacagtgcaggggaaagaatagtagacataatagcaacagacatacaaactaaag

SEQ ID NO: 21450 - DNA, 301 bp, Artificial Sequence
  NTC.15_NTC.34
  crRNA array
  misc_feature (148)..(157): n is a, c, g, or t
cttggctttatatatcttgtggaaaggacgaaacaccgtaatttctactaagtgtagatgttgtcgtgccgcgaatttataatttctactaagtgtagattagcgttcgacacgtgaaactaatttctactaagtgtagatttttttnnnnnnnnnnaagcttggcgtggatccgatatcaactagatcttgagacaaatggcagtattcatccacaattttaaaagaaaaggggggattggggggtacagtgcaggggaaagaatagtagacataatagcaacagacatacaaactaaag

SEQ ID NO: 21451 - DNA, 301 bp, Artificial Sequence
  NTC.15_NTC.16
  crRNA array
  misc_feature (148)..(157): n is a, c, g, or t
cttggctttatatatcttgtggaaaggacgaaacaccgtaatttctactaagtgtagatgttgtcgtgccgcgaatttataatttctactaagtgtagatcggtacgttagacgaaaatttaatttctactaagtgtagatttttttnnnnnnnnnnaagcttggcgtggatccgatatcaactagatcttgagacaaatggcagtattcatccacaattttaaaagaaaaggggggattggggggtacagtgcaggggaaagaatagtagacataatagcaacagacatacaaactaaag

SEQ ID NO: 21452 - DNA, 301 bp, Artificial Sequence
  NTC.15_NTC.4
  crRNA array
  misc_feature (148)..(157): n is a, c, g, or t
cttggctttatatatcttgtggaaaggacgaaacaccgtaatttctactaagtgtagatgttgtcgtgccgcgaatttataatttctactaagtgtagatatacccgtcgcgaacgtgagtaatttctactaagtgtagatttttttnnnnnnnnnnaagcttggcgtggatccgatatcaactagatcttgagacaaatggcagtattcatccacaattttaaaagaaaaggggggattggggggtacagtgcaggggaaagaatagtagacataatagcaacagacatacaaactaaag

SEQ ID NO: 21453 - DNA, 301 bp, Artificial Sequence
  NTC.15_NTC.42
  crRNA array
  misc_feature (148)..(157): n is a, c, g, or t
cttggctttatatatcttgtggaaaggacgaaacaccgtaatttctactaagtgtagatgttgtcgtgccgcgaatttataatttctactaagtgtagatggtcaaatcgcggcgataactaatttctactaagtgtagatttttttnnnnnnnnnnaagcttggcgtggatccgatatcaactagatcttgagacaaatggcagtattcatccacaattttaaaagaaaaggggggattggggggtacagtgcaggggaaagaatagtagacataatagcaacagacatacaaactaaag

SEQ ID NO: 21454 - DNA, 301 bp, Artificial Sequence
  NTC.15_NTC.22
  crRNA array
  misc_feature (148)..(157): n is a, c, g, or t
cttggctttatatatcttgtggaaaggacgaaacaccgtaatttctactaagtgtagatgttgtcgtgccgcgaatttataatttctactaagtgtagatgcgcgtcaacgtaatgtgcctaatttctactaagtgtagatttttttnnnnnnnnnnaagcttggcgtggatccgatatcaactagatcttgagacaaatggcagtattcatccacaattttaaaagaaaaggggggattggggggtacagtgcaggggaaagaatagtagacataatagcaacagacatacaaactaaag

SEQ ID NO: 21455 - DNA, 301 bp, Artificial Sequence
  NTC.15_NTC.17
  crRNA array
  misc_feature (148)..(157): n is a, c, g, or t
cttggctttatatatcttgtggaaaggacgaaacaccgtaatttctactaagtgtagatgttgtcgtgccgcgaatttataatttctactaagtgtagattatcgaacgctatcgaacgttaatttctactaagtgtagatttttttnnnnnnnnnnaagcttggcgtggatccgatatcaactagatcttgagacaaatggcagtattcatccacaattttaaaagaaaaggggggattggggggtacagtgcaggggaaagaatagtagacataatagcaacagacatacaaactaaag

SEQ ID NO: 21456 - DNA, 301 bp, Artificial Sequence
  NTC.15_NTC.9
  crRNA array
  misc_feature (148)..(157): n is a, c, g, or t
cttggctttatatatcttgtggaaaggacgaaacaccgtaatttctactaagtgtagatgttgtcgtgccgcgaatttataatttctactaagtgtagatatcgccgtacggctatggcataatttctactaagtgtagatttttttnnnnnnnnnnaagcttggcgtggatccgatatcaactagatcttgagacaaatggcagtattcatccacaattttaaaagaaaaggggggattggggggtacagtgcaggggaaagaatagtagacataatagcaacagacatacaaactaaag

SEQ ID NO: 21457 - DNA, 301 bp, Artificial Sequence
  NTC.15_NTC.30
  crRNA array
  misc_feature (148)..(157): n is a, c, g, or t
cttggctttatatatcttgtggaaaggacgaaacaccgtaatttctactaagtgtagatgttgtcgtgccgcgaatttataatttctactaagtgtagatcgatcgtacgggtgtcctaataatttctactaagtgtagatttttttnnnnnnnnnnaagcttggcgtggatccgatatcaactagatcttgagacaaatggcagtattcatccacaattttaaaagaaaaggggggattggggggtacagtgcaggggaaagaatagtagacataatagcaacagacatacaaactaaag

SEQ ID NO: 21458 - DNA, 301 bp, Artificial Sequence
  NTC.15_NTC.8
  crRNA array
  misc_feature (148)..(157): n is a, c, g, or t
cttggctttatatatcttgtggaaaggacgaaacaccgtaatttctactaagtgtagatgttgtcgtgccgcgaatttataatttctactaagtgtagatcgaccgaggttacgctgggataatttctactaagtgtagatttttttnnnnnnnnnnaagcttggcgtggatccgatatcaactagatcttgagacaaatggcagtattcatccacaattttaaaagaaaaggggggattggggggtacagtgcaggggaaagaatagtagacataatagcaacagacatacaaactaaag

SEQ ID NO: 21459 - DNA, 301 bp, Artificial Sequence
  NTC.15_NTC.46
  crRNA array
  misc_feature (148)..(157): n is a, c, g, or t
cttggctttatatatcttgtggaaaggacgaaacaccgtaatttctactaagtgtagatgttgtcgtgccgcgaatttataatttctactaagtgtagatagcgggtcgtagacgcgcggtaatttctactaagtgtagatttttttnnnnnnnnnnaagcttggcgtggatccgatatcaactagatcttgagacaaatggcagtattcatccacaattttaaaagaaaaggggggattggggggtacagtgcaggggaaagaatagtagacataatagcaacagacatacaaactaaag

SEQ ID NO: 21460 - DNA, 301 bp, Artificial Sequence
  NTC.15_NTC.35
  crRNA array
  misc_feature (148)..(157): n is a, c, g, or t
cttggctttatatatcttgtggaaaggacgaaacaccgtaatttctactaagtgtagatgttgtcgtgccgcgaatttataatttctactaagtgtagattggcgcgtaatcgctattcgtaatttctactaagtgtagatttttttnnnnnnnnnnaagcttggcgtggatccgatatcaactagatcttgagacaaatggcagtattcatccacaattttaaaagaaaaggggggattggggggtacagtgcaggggaaagaatagtagacataatagcaacagacatacaaactaaag

SEQ ID NO: 21461 - DNA, 301 bp, Artificial Sequence
  NTC.15_NTC.10
  crRNA array
  misc_feature (148)..(157): n is a, c, g, or t
cttggctttatatatcttgtggaaaggacgaaacaccgtaatttctactaagtgtagatgttgtcgtgccgcgaatttataatttctactaagtgtagatcgctaagttcgcgcgggccgtaatttctactaagtgtagatttttttnnnnnnnnnnaagcttggcgtggatccgatatcaactagatcttgagacaaatggcagtattcatccacaattttaaaagaaaaggggggattggggggtacagtgcaggggaaagaatagtagacataatagcaacagacatacaaactaaag

SEQ ID NO: 21462 - DNA, 301 bp, Artificial Sequence
  NTC.15_NTC.11
  crRNA array
  misc_feature (148)..(157): n is a, c, g, or t
cttggctttatatatcttgtggaaaggacgaaacaccgtaatttctactaagtgtagatgttgtcgtgccgcgaatttataatttctactaagtgtagatcgttcgtcgacgaagcaatctaatttctactaagtgtagatttttttnnnnnnnnnnaagcttggcgtggatccgatatcaactagatcttgagacaaatggcagtattcatccacaattttaaaagaaaaggggggattggggggtacagtgcaggggaaagaatagtagacataatagcaacagacatacaaactaaag

SEQ ID NO: 21463 - DNA, 301 bp, Artificial Sequence
  NTC.15_NTC.14
  crRNA array
  misc_feature (148)..(157): n is a, c, g, or t
cttggctttatatatcttgtggaaaggacgaaacaccgtaatttctactaagtgtagatgttgtcgtgccgcgaatttataatttctactaagtgtagatccgttcgtgcgatagtgttttaatttctactaagtgtagatttttttnnnnnnnnnnaagcttggcgtggatccgatatcaactagatcttgagacaaatggcagtattcatccacaattttaaaagaaaaggggggattggggggtacagtgcaggggaaagaatagtagacataatagcaacagacatacaaactaaag

SEQ ID NO: 21464 - DNA, 301 bp, Artificial Sequence
  NTC.15_NTC.28
  crRNA array
  misc_feature (148)..(157): n is a, c, g, or t
cttggctttatatatcttgtggaaaggacgaaacaccgtaatttctactaagtgtagatgttgtcgtgccgcgaatttataatttctactaagtgtagataccgctaatcggcgtaaacttaatttctactaagtgtagatttttttnnnnnnnnnnaagcttggcgtggatccgatatcaactagatcttgagacaaatggcagtattcatccacaattttaaaagaaaaggggggattggggggtacagtgcaggggaaagaatagtagacataatagcaacagacatacaaactaaag

SEQ ID NO: 21465 - DNA, 301 bp, Artificial Sequence
  NTC.45_NTC.12
  crRNA array
  misc_feature (148)..(157): n is a, c, g, or t
cttggctttatatatcttgtggaaaggacgaaacaccgtaatttctactaagtgtagatcggaacgcgtgatactagggtaatttctactaagtgtagatcgccgacgattaatcaatagtaatttctactaagtgtagatttttttnnnnnnnnnnaagcttggcgtggatccgatatcaactagatcttgagacaaatggcagtattcatccacaattttaaaagaaaaggggggattggggggtacagtgcaggggaaagaatagtagacataatagcaacagacatacaaactaaag

SEQ ID NO: 21466 - DNA, 301 bp, Artificial Sequence
  NTC.45_NTC.19
  crRNA array
  misc_feature (148)..(157): n is a, c, g, or t
cttggctttatatatcttgtggaaaggacgaaacaccgtaatttctactaagtgtagatcggaacgcgtgatactagggtaatttctactaagtgtagatcgtcgtagaacgatacccgataatttctactaagtgtagatttttttnnnnnnnnnnaagcttggcgtggatccgatatcaactagatcttgagacaaatggcagtattcatccacaattttaaaagaaaaggggggattggggggtacagtgcaggggaaagaatagtagacataatagcaacagacatacaaactaaag

SEQ ID NO: 21467 - DNA, 301 bp, Artificial Sequence
  NTC.45_NTC.20
  crRNA array
  misc_feature (148)..(157): n is a, c, g, or t
cttggctttatatatcttgtggaaaggacgaaacaccgtaatttctactaagtgtagatcggaacgcgtgatactagggtaatttctactaagtgtagatattccggcgcgaccagaagataatttctactaagtgtagatttttttnnnnnnnnnnaagcttggcgtggatccgatatcaactagatcttgagacaaatggcagtattcatccacaattttaaaagaaaaggggggattggggggtacagtgcaggggaaagaatagtagacataatagcaacagacatacaaactaaag

SEQ ID NO: 21468 - DNA, 301 bp, Artificial Sequence
  NTC.45_NTC.48
  crRNA array
  misc_feature (148)..(157): n is a, c, g, or t
cttggctttatatatcttgtggaaaggacgaaacaccgtaatttctactaagtgtagatcggaacgcgtgatactagggtaatttctactaagtgtagatcggtcgactacggctgttagtaatttctactaagtgtagatttttttnnnnnnnnnnaagcttggcgtggatccgatatcaactagatcttgagacaaatggcagtattcatccacaattttaaaagaaaaggggggattggggggtacagtgcaggggaaagaatagtagacataatagcaacagacatacaaactaaag

SEQ ID NO: 21469 - DNA, 301 bp, Artificial Sequence
  NTC.45_NTC.26
  crRNA array
  misc_feature (148)..(157): n is a, c, g, or t
cttggctttatatatcttgtggaaaggacgaaacaccgtaatttctactaagtgtagatcggaacgcgtgatactagggtaatttctactaagtgtagatcgcgacggcggttttaacactaatttctactaagtgtagatttttttnnnnnnnnnnaagcttggcgtggatccgatatcaactagatcttgagacaaatggcagtattcatccacaattttaaaagaaaaggggggattggggggtacagtgcaggggaaagaatagtagacataatagcaacagacatacaaactaaag

SEQ ID NO: 21470 - DNA, 301 bp, Artificial Sequence
  NTC.45_NTC.27
  crRNA array
  misc_feature (148)..(157): n is a, c, g, or t
cttggctttatatatcttgtggaaaggacgaaacaccgtaatttctactaagtgtagatcggaacgcgtgatactagggtaatttctactaagtgtagatgtcgcgttgcgaccggcgcttaatttctactaagtgtagatttttttnnnnnnnnnnaagcttggcgtggatccgatatcaactagatcttgagacaaatggcagtattcatccacaattttaaaagaaaaggggggattggggggtacagtgcaggggaaagaatagtagacataatagcaacagacatacaaactaaag

SEQ ID NO: 21471 - DNA, 301 bp, Artificial Sequence
  NTC.45_NTC.34
  crRNA array
  misc_feature (148)..(157): n is a, c, g, or t
cttggctttatatatcttgtggaaaggacgaaacaccgtaatttctactaagtgtagatcggaacgcgtgatactagggtaatttctactaagtgtagattagcgttcgacacgtgaaactaatttctactaagtgtagatttttttnnnnnnnnnnaagcttggcgtggatccgatatcaactagatcttgagacaaatggcagtattcatccacaattttaaaagaaaaggggggattggggggtacagtgcaggggaaagaatagtagacataatagcaacagacatacaaactaaag

SEQ ID NO: 21472 - DNA, 301 bp, Artificial Sequence
  NTC.45_NTC.16
  crRNA array
  misc_feature (148)..(157): n is a, c, g, or t
cttggctttatatatcttgtggaaaggacgaaacaccgtaatttctactaagtgtagatcggaacgcgtgatactagggtaatttctactaagtgtagatcggtacgttagacgaaaatttaatttctactaagtgtagatttttttnnnnnnnnnnaagcttggcgtggatccgatatcaactagatcttgagacaaatggcagtattcatccacaattttaaaagaaaaggggggattggggggtacagtgcaggggaaagaatagtagacataatagcaacagacatacaaactaaag

SEQ ID NO: 21473 - DNA, 301 bp, Artificial Sequence
  NTC.45_NTC.4
  crRNA array
  misc_feature (148)..(157): n is a, c, g, or t
cttggctttatatatcttgtggaaaggacgaaacaccgtaatttctactaagtgtagatcggaacgcgtgatactagggtaatttctactaagtgtagatatacccgtcgcgaacgtgagtaatttctactaagtgtagatttttttnnnnnnnnnnaagcttggcgtggatccgatatcaactagatcttgagacaaatggcagtattcatccacaattttaaaagaaaaggggggattggggggtacagtgcaggggaaagaatagtagacataatagcaacagacatacaaactaaag

SEQ ID NO: 21474 - DNA, 301 bp, Artificial Sequence
  NTC.45_NTC.42
  crRNA array
  misc_feature (148)..(157): n is a, c, g, or t
cttggctttatatatcttgtggaaaggacgaaacaccgtaatttctactaagtgtagatcggaacgcgtgatactagggtaatttctactaagtgtagatggtcaaatcgcggcgataactaatttctactaagtgtagatttttttnnnnnnnnnnaagcttggcgtggatccgatatcaactagatcttgagacaaatggcagtattcatccacaattttaaaagaaaaggggggattggggggtacagtgcaggggaaagaatagtagacataatagcaacagacatacaaactaaag

SEQ ID NO: 21475 - DNA, 301 bp, Artificial Sequence
  NTC.45_NTC.22
  crRNA array
  misc_feature (148)..(157): n is a, c, g, or t
cttggctttatatatcttgtggaaaggacgaaacaccgtaatttctactaagtgtagatcggaacgcgtgatactagggtaatttctactaagtgtagatgcgcgtcaacgtaatgtgcctaatttctactaagtgtagatttttttnnnnnnnnnnaagcttggcgtggatccgatatcaactagatcttgagacaaatggcagtattcatccacaattttaaaagaaaaggggggattggggggtacagtgcaggggaaagaatagtagacataatagcaacagacatacaaactaaag

SEQ ID NO: 21476 - DNA, 301 bp, Artificial Sequence
  NTC.45_NTC.17
  crRNA array
  misc_feature (148)..(157): n is a, c, g, or t
cttggctttatatatcttgtggaaaggacgaaacaccgtaatttctactaagtgtagatcggaacgcgtgatactagggtaatttctactaagtgtagattatcgaacgctatcgaacgttaatttctactaagtgtagatttttttnnnnnnnnnnaagcttggcgtggatccgatatcaactagatcttgagacaaatggcagtattcatccacaattttaaaagaaaaggggggattggggggtacagtgcaggggaaagaatagtagacataatagcaacagacatacaaactaaag

SEQ ID NO: 21477 - DNA, 301 bp, Artificial Sequence
  NTC.45_NTC.9
  crRNA array
  misc_feature (148)..(157): n is a, c, g, or t
cttggctttatatatcttgtggaaaggacgaaacaccgtaatttctactaagtgtagatcggaacgcgtgatactagggtaatttctactaagtgtagatatcgccgtacggctatggcataatttctactaagtgtagatttttttnnnnnnnnnnaagcttggcgtggatccgatatcaactagatcttgagacaaatggcagtattcatccacaattttaaaagaaaaggggggattggggggtacagtgcaggggaaagaatagtagacataatagcaacagacatacaaactaaag

SEQ ID NO: 21478 - DNA, 301 bp, Artificial Sequence
  NTC.45_NTC.30
  crRNA array
  misc_feature (148)..(157): n is a, c, g, or t
cttggctttatatatcttgtggaaaggacgaaacaccgtaatttctactaagtgtagatcggaacgcgtgatactagggtaatttctactaagtgtagatcgatcgtacgggtgtcctaataatttctactaagtgtagatttttttnnnnnnnnnnaagcttggcgtggatccgatatcaactagatcttgagacaaatggcagtattcatccacaattttaaaagaaaaggggggattggggggtacagtgcaggggaaagaatagtagacataatagcaacagacatacaaactaaag

SEQ ID NO: 21479 - DNA, 301 bp, Artificial Sequence
  NTC.45_NTC.8
  crRNA array
  misc_feature (148)..(157): n is a, c, g, or t
cttggctttatatatcttgtggaaaggacgaaacaccgtaatttctactaagtgtagatcggaacgcgtgatactagggtaatttctactaagtgtagatcgaccgaggttacgctgggataatttctactaagtgtagatttttttnnnnnnnnnnaagcttggcgtggatccgatatcaactagatcttgagacaaatggcagtattcatccacaattttaaaagaaaaggggggattggggggtacagtgcaggggaaagaatagtagacataatagcaacagacatacaaactaaag

SEQ ID NO: 21480 - DNA, 301 bp, Artificial Sequence
  NTC.45_NTC.46
  crRNA array
  misc_feature (148)..(157): n is a, c, g, or t
cttggctttatatatcttgtggaaaggacgaaacaccgtaatttctactaagtgtagatcggaacgcgtgatactagggtaatttctactaagtgtagatagcgggtcgtagacgcgcggtaatttctactaagtgtagatttttttnnnnnnnnnnaagcttggcgtggatccgatatcaactagatcttgagacaaatggcagtattcatccacaattttaaaagaaaaggggggattggggggtacagtgcaggggaaagaatagtagacataatagcaacagacatacaaactaaag

SEQ ID NO: 21481 - DNA, 301 bp, Artificial Sequence
  NTC.45_NTC.35
  crRNA array
  misc_feature (148)..(157): n is a, c, g, or t
cttggctttatatatcttgtggaaaggacgaaacaccgtaatttctactaagtgtagatcggaacgcgtgatactagggtaatttctactaagtgtagattggcgcgtaatcgctattcgtaatttctactaagtgtagatttttttnnnnnnnnnnaagcttggcgtggatccgatatcaactagatcttgagacaaatggcagtattcatccacaattttaaaagaaaaggggggattggggggtacagtgcaggggaaagaatagtagacataatagcaacagacatacaaactaaag

SEQ ID NO: 21482 - DNA, 301 bp, Artificial Sequence
  NTC.45_NTC.10
  crRNA array
  misc_feature (148)..(157): n is a, c, g, or t
cttggctttatatatcttgtggaaaggacgaaacaccgtaatttctactaagtgtagatcggaacgcgtgatactagggtaatttctactaagtgtagatcgctaagttcgcgcgggccgtaatttctactaagtgtagatttttttnnnnnnnnnnaagcttggcgtggatccgatatcaactagatcttgagacaaatggcagtattcatccacaattttaaaagaaaaggggggattggggggtacagtgcaggggaaagaatagtagacataatagcaacagacatacaaactaaag

SEQ ID NO: 21483 - DNA, 301 bp, Artificial Sequence
  NTC.45_NTC.11
  crRNA array
  misc_feature (148)..(157): n is a, c, g, or t
cttggctttatatatcttgtggaaaggacgaaacaccgtaatttctactaagtgtagatcggaacgcgtgatactagggtaatttctactaagtgtagatcgttcgtcgacgaagcaatctaatttctactaagtgtagatttttttnnnnnnnnnnaagcttggcgtggatccgatatcaactagatcttgagacaaatggcagtattcatccacaattttaaaagaaaaggggggattggggggtacagtgcaggggaaagaatagtagacataatagcaacagacatacaaactaaag

SEQ ID NO: 21484 - DNA, 301 bp, Artificial Sequence
  NTC.45_NTC.14
  crRNA array
  misc_feature (148)..(157): n is a, c, g, or t
cttggctttatatatcttgtggaaaggacgaaacaccgtaatttctactaagtgtagatcggaacgcgtgatactagggtaatttctactaagtgtagatccgttcgtgcgatagtgttttaatttctactaagtgtagatttttttnnnnnnnnnnaagcttggcgtggatccgatatcaactagatcttgagacaaatggcagtattcatccacaattttaaaagaaaaggggggattggggggtacagtgcaggggaaagaatagtagacataatagcaacagacatacaaactaaag

SEQ ID NO: 21485 - DNA, 301 bp, Artificial Sequence
  NTC.45_NTC.28
  crRNA array
  misc_feature (148)..(157): n is a, c, g, or t
cttggctttatatatcttgtggaaaggacgaaacaccgtaatttctactaagtgtagatcggaacgcgtgatactagggtaatttctactaagtgtagataccgctaatcggcgtaaacttaatttctactaagtgtagatttttttnnnnnnnnnnaagcttggcgtggatccgatatcaactagatcttgagacaaatggcagtattcatccacaattttaaaagaaaaggggggattggggggtacagtgcaggggaaagaatagtagacataatagcaacagacatacaaactaaag

SEQ ID NO: 21486 - DNA, 301 bp, Artificial Sequence
  NTC.12_NTC.19
  crRNA array
  misc_feature (148)..(157): n is a, c, g, or t
cttggctttatatatcttgtggaaaggacgaaacaccgtaatttctactaagtgtagatcgccgacgattaatcaatagtaatttctactaagtgtagatcgtcgtagaacgatacccgataatttctactaagtgtagatttttttnnnnnnnnnnaagcttggcgtggatccgatatcaactagatcttgagacaaatggcagtattcatccacaattttaaaagaaaaggggggattggggggtacagtgcaggggaaagaatagtagacataatagcaacagacatacaaactaaag

SEQ ID NO: 21487 - DNA, 301 bp, Artificial Sequence
  NTC.12_NTC.20
  crRNA array
  misc_feature (148)..(157): n is a, c, g, or t
cttggctttatatatcttgtggaaaggacgaaacaccgtaatttctactaagtgtagatcgccgacgattaatcaatagtaatttctactaagtgtagatattccggcgcgaccagaagataatttctactaagtgtagatttttttnnnnnnnnnnaagcttggcgtggatccgatatcaactagatcttgagacaaatggcagtattcatccacaattttaaaagaaaaggggggattggggggtacagtgcaggggaaagaatagtagacataatagcaacagacatacaaactaaag

SEQ ID NO: 21488 - DNA, 301 bp, Artificial Sequence
  NTC.12_NTC.48
  crRNA array
  misc_feature (148)..(157): n is a, c, g, or t
cttggctttatatatcttgtggaaaggacgaaacaccgtaatttctactaagtgtagatcgccgacgattaatcaatagtaatttctactaagtgtagatcggtcgactacggctgttagtaatttctactaagtgtagatttttttnnnnnnnnnnaagcttggcgtggatccgatatcaactagatcttgagacaaatggcagtattcatccacaattttaaaagaaaaggggggattggggggtacagtgcaggggaaagaatagtagacataatagcaacagacatacaaactaaag

SEQ ID NO: 21489 - DNA, 301 bp, Artificial Sequence
  NTC.12_NTC.26
  crRNA array
  misc_feature (148)..(157): n is a, c, g, or t
cttggctttatatatcttgtggaaaggacgaaacaccgtaatttctactaagtgtagatcgccgacgattaatcaatagtaatttctactaagtgtagatcgcgacggcggttttaacactaatttctactaagtgtagatttttttnnnnnnnnnnaagcttggcgtggatccgatatcaactagatcttgagacaaatggcagtattcatccacaattttaaaagaaaaggggggattggggggtacagtgcaggggaaagaatagtagacataatagcaacagacatacaaactaaag

SEQ ID NO: 21490 - DNA, 301 bp, Artificial Sequence
  NTC.12_NTC.27
  crRNA array
  misc_feature (148)..(157): n is a, c, g, or t
cttggctttatatatcttgtggaaaggacgaaacaccgtaatttctactaagtgtagatcgccgacgattaatcaatagtaatttctactaagtgtagatgtcgcgttgcgaccggcgcttaatttctactaagtgtagatttttttnnnnnnnnnnaagcttggcgtggatccgatatcaactagatcttgagacaaatggcagtattcatccacaattttaaaagaaaaggggggattggggggtacagtgcaggggaaagaatagtagacataatagcaacagacatacaaactaaag

SEQ ID NO: 21491 - DNA, 301 bp, Artificial Sequence
  NTC.12_NTC.34
  crRNA array
  misc_feature (148)..(157): n is a, c, g, or t
cttggctttatatatcttgtggaaaggacgaaacaccgtaatttctactaagtgtagatcgccgacgattaatcaatagtaatttctactaagtgtagattagcgttcgacacgtgaaactaatttctactaagtgtagatttttttnnnnnnnnnnaagcttggcgtggatccgatatcaactagatcttgagacaaatggcagtattcatccacaattttaaaagaaaaggggggattggggggtacagtgcaggggaaagaatagtagacataatagcaacagacatacaaactaaag

SEQ ID NO: 21492 - DNA, 301 bp, Artificial Sequence
  NTC.12_NTC.16
  crRNA array
  misc_feature (148)..(157): n is a, c, g, or t
cttggctttatatatcttgtggaaaggacgaaacaccgtaatttctactaagtgtagatcgccgacgattaatcaatagtaatttctactaagtgtagatcggtacgttagacgaaaatttaatttctactaagtgtagatttttttnnnnnnnnnnaagcttggcgtggatccgatatcaactagatcttgagacaaatggcagtattcatccacaattttaaaagaaaaggggggattggggggtacagtgcaggggaaagaatagtagacataatagcaacagacatacaaactaaag

SEQ ID NO: 21493 - DNA, 301 bp, Artificial Sequence
  NTC.12_NTC.4
  crRNA array
  misc_feature (148)..(157): n is a, c, g, or t
cttggctttatatatcttgtggaaaggacgaaacaccgtaatttctactaagtgtagatcgccgacgattaatcaatagtaatttctactaagtgtagatatacccgtcgcgaacgtgagtaatttctactaagtgtagatttttttnnnnnnnnnnaagcttggcgtggatccgatatcaactagatcttgagacaaatggcagtattcatccacaattttaaaagaaaaggggggattggggggtacagtgcaggggaaagaatagtagacataatagcaacagacatacaaactaaag

SEQ ID NO: 21494 - DNA, 301 bp, Artificial Sequence
  NTC.12_NTC.42
  crRNA array
  misc_feature (148)..(157): n is a, c, g, or t
cttggctttatatatcttgtggaaaggacgaaacaccgtaatttctactaagtgtagatcgccgacgattaatcaatagtaatttctactaagtgtagatggtcaaatcgcggcgataactaatttctactaagtgtagatttttttnnnnnnnnnnaagcttggcgtggatccgatatcaactagatcttgagacaaatggcagtattcatccacaattttaaaagaaaaggggggattggggggtacagtgcaggggaaagaatagtagacataatagcaacagacatacaaactaaag

SEQ ID NO: 21495 - DNA, 301 bp, Artificial Sequence
  NTC.12_NTC.22
  crRNA array
  misc_feature (148)..(157): n is a, c, g, or t
cttggctttatatatcttgtggaaaggacgaaacaccgtaatttctactaagtgtagatcgccgacgattaatcaatagtaatttctactaagtgtagatgcgcgtcaacgtaatgtgcctaatttctactaagtgtagatttttttnnnnnnnnnnaagcttggcgtggatccgatatcaactagatcttgagacaaatggcagtattcatccacaattttaaaagaaaaggggggattggggggtacagtgcaggggaaagaatagtagacataatagcaacagacatacaaactaaag

SEQ ID NO: 21496 - DNA, 301 bp, Artificial Sequence
  NTC.12_NTC.17
  crRNA array
  misc_feature (148)..(157): n is a, c, g, or t
cttggctttatatatcttgtggaaaggacgaaacaccgtaatttctactaagtgtagatcgccgacgattaatcaatagtaatttctactaagtgtagattatcgaacgctatcgaacgttaatttctactaagtgtagatttttttnnnnnnnnnnaagcttggcgtggatccgatatcaactagatcttgagacaaatggcagtattcatccacaattttaaaagaaaaggggggattggggggtacagtgcaggggaaagaatagtagacataatagcaacagacatacaaactaaag

SEQ ID NO: 21497 - DNA, 301 bp, Artificial Sequence
  NTC.12_NTC.9
  crRNA array
  misc_feature (148)..(157): n is a, c, g, or t
cttggctttatatatcttgtggaaaggacgaaacaccgtaatttctactaagtgtagatcgccgacgattaatcaatagtaatttctactaagtgtagatatcgccgtacggctatggcataatttctactaagtgtagatttttttnnnnnnnnnnaagcttggcgtggatccgatatcaactagatcttgagacaaatggcagtattcatccacaattttaaaagaaaaggggggattggggggtacagtgcaggggaaagaatagtagacataatagcaacagacatacaaactaaag

SEQ ID NO: 21498 - DNA, 301 bp, Artificial Sequence
  NTC.12_NTC.30
  crRNA array
  misc_feature (148)..(157): n is a, c, g, or t
cttggctttatatatcttgtggaaaggacgaaacaccgtaatttctactaagtgtagatcgccgacgattaatcaatagtaatttctactaagtgtagatcgatcgtacgggtgtcctaataatttctactaagtgtagatttttttnnnnnnnnnnaagcttggcgtggatccgatatcaactagatcttgagacaaatggcagtattcatccacaattttaaaagaaaaggggggattggggggtacagtgcaggggaaagaatagtagacataatagcaacagacatacaaactaaag

SEQ ID NO: 21499 - DNA, 301 bp, Artificial Sequence
  NTC.12_NTC.8
  crRNA array
  misc_feature (148)..(157): n is a, c, g, or t
cttggctttatatatcttgtggaaaggacgaaacaccgtaatttctactaagtgtagatcgccgacgattaatcaatagtaatttctactaagtgtagatcgaccgaggttacgctgggataatttctactaagtgtagatttttttnnnnnnnnnnaagcttggcgtggatccgatatcaactagatcttgagacaaatggcagtattcatccacaattttaaaagaaaaggggggattggggggtacagtgcaggggaaagaatagtagacataatagcaacagacatacaaactaaag

SEQ ID NO: 21500 - DNA, 301 bp, Artificial Sequence
  NTC.12_NTC.46
  crRNA array
  misc_feature (148)..(157): n is a, c, g, or t
cttggctttatatatcttgtggaaaggacgaaacaccgtaatttctactaagtgtagatcgccgacgattaatcaatagtaatttctactaagtgtagatagcgggtcgtagacgcgcggtaatttctactaagtgtagatttttttnnnnnnnnnnaagcttggcgtggatccgatatcaactagatcttgagacaaatggcagtattcatccacaattttaaaagaaaaggggggattggggggtacagtgcaggggaaagaatagtagacataatagcaacagacatacaaactaaag

SEQ ID NO: 21501 - DNA, 301 bp, Artificial Sequence
  NTC.12_NTC.35
  crRNA array
  misc_feature (148)..(157): n is a, c, g, or t
cttggctttatatatcttgtggaaaggacgaaacaccgtaatttctactaagtgtagatcgccgacgattaatcaatagtaatttctactaagtgtagattggcgcgtaatcgctattcgtaatttctactaagtgtagatttttttnnnnnnnnnnaagcttggcgtggatccgatatcaactagatcttgagacaaatggcagtattcatccacaattttaaaagaaaaggggggattggggggtacagtgcaggggaaagaatagtagacataatagcaacagacatacaaactaaag

SEQ ID NO: 21502 - DNA, 301 bp, Artificial Sequence
  NTC.12_NTC.10
  crRNA array
  misc_feature (148)..(157): n is a, c, g, or t
cttggctttatatatcttgtggaaaggacgaaacaccgtaatttctactaagtgtagatcgccgacgattaatcaatagtaatttctactaagtgtagatcgctaagttcgcgcgggccgtaatttctactaagtgtagatttttttnnnnnnnnnnaagcttggcgtggatccgatatcaactagatcttgagacaaatggcagtattcatccacaattttaaaagaaaaggggggattggggggtacagtgcaggggaaagaatagtagacataatagcaacagacatacaaactaaag

SEQ ID NO: 21503 - DNA, 301 bp, Artificial Sequence
  NTC.12_NTC.11
  crRNA array
  misc_feature (148)..(157): n is a, c, g, or t
cttggctttatatatcttgtggaaaggacgaaacaccgtaatttctactaagtgtagatcgccgacgattaatcaatagtaatttctactaagtgtagatcgttcgtcgacgaagcaatctaatttctactaagtgtagatttttttnnnnnnnnnnaagcttggcgtggatccgatatcaactagatcttgagacaaatggcagtattcatccacaattttaaaagaaaaggggggattggggggtacagtgcaggggaaagaatagtagacataatagcaacagacatacaaactaaag

SEQ ID NO: 21504 - DNA, 301 bp, Artificial Sequence
  NTC.12_NTC.14
  crRNA array
  misc_feature (148)..(157): n is a, c, g, or t
cttggctttatatatcttgtggaaaggacgaaacaccgtaatttctactaagtgtagatcgccgacgattaatcaatagtaatttctactaagtgtagatccgttcgtgcgatagtgttttaatttctactaagtgtagatttttttnnnnnnnnnnaagcttggcgtggatccgatatcaactagatcttgagacaaatggcagtattcatccacaattttaaaagaaaaggggggattggggggtacagtgcaggggaaagaatagtagacataatagcaacagacatacaaactaaag

SEQ ID NO: 21505 - DNA, 301 bp, Artificial Sequence
  NTC.12_NTC.28
  crRNA array
  misc_feature (148)..(157): n is a, c, g, or t
cttggctttatatatcttgtggaaaggacgaaacaccgtaatttctactaagtgtagatcgccgacgattaatcaatagtaatttctactaagtgtagataccgctaatcggcgtaaacttaatttctactaagtgtagatttttttnnnnnnnnnnaagcttggcgtggatccgatatcaactagatcttgagacaaatggcagtattcatccacaattttaaaagaaaaggggggattggggggtacagtgcaggggaaagaatagtagacataatagcaacagacatacaaactaaag

SEQ ID NO: 21506 - DNA, 301 bp, Artificial Sequence
  NTC.19_NTC.20
  crRNA array
  misc_feature (148)..(157): n is a, c, g, or t
cttggctttatatatcttgtggaaaggacgaaacaccgtaatttctactaagtgtagatcgtcgtagaacgatacccgataatttctactaagtgtagatattccggcgcgaccagaagataatttctactaagtgtagatttttttnnnnnnnnnnaagcttggcgtggatccgatatcaactagatcttgagacaaatggcagtattcatccacaattttaaaagaaaaggggggattggggggtacagtgcaggggaaagaatagtagacataatagcaacagacatacaaactaaag

SEQ ID NO: 21507 - DNA, 301 bp, Artificial Sequence
  NTC.19_NTC.48
  crRNA array
  misc_feature (148)..(157): n is a, c, g, or t
cttggctttatatatcttgtggaaaggacgaaacaccgtaatttctactaagtgtagatcgtcgtagaacgatacccgataatttctactaagtgtagatcggtcgactacggctgttagtaatttctactaagtgtagatttttttnnnnnnnnnnaagcttggcgtggatccgatatcaactagatcttgagacaaatggcagtattcatccacaattttaaaagaaaaggggggattggggggtacagtgcaggggaaagaatagtagacataatagcaacagacatacaaactaaag

SEQ ID NO: 21508 - DNA, 301 bp, Artificial Sequence
  NTC.19_NTC.26
  crRNA array
  misc_feature (148)..(157): n is a, c, g, or t
cttggctttatatatcttgtggaaaggacgaaacaccgtaatttctactaagtgtagatcgtcgtagaacgatacccgataatttctactaagtgtagatcgcgacggcggttttaacactaatttctactaagtgtagatttttttnnnnnnnnnnaagcttggcgtggatccgatatcaactagatcttgagacaaatggcagtattcatccacaattttaaaagaaaaggggggattggggggtacagtgcaggggaaagaatagtagacataatagcaacagacatacaaactaaag

SEQ ID NO: 21509 - DNA, 301 bp, Artificial Sequence
  NTC.19_NTC.27
  crRNA array
  misc_feature (148)..(157): n is a, c, g, or t
cttggctttatatatcttgtggaaaggacgaaacaccgtaatttctactaagtgtagatcgtcgtagaacgatacccgataatttctactaagtgtagatgtcgcgttgcgaccggcgcttaatttctactaagtgtagatttttttnnnnnnnnnnaagcttggcgtggatccgatatcaactagatcttgagacaaatggcagtattcatccacaattttaaaagaaaaggggggattggggggtacagtgcaggggaaagaatagtagacataatagcaacagacatacaaactaaag

SEQ ID NO: 21510 - DNA, 301 bp, Artificial Sequence
  NTC.19_NTC.34
  crRNA array
  misc_feature (148)..(157): n is a, c, g, or t
cttggctttatatatcttgtggaaaggacgaaacaccgtaatttctactaagtgtagatcgtcgtagaacgatacccgataatttctactaagtgtagattagcgttcgacacgtgaaactaatttctactaagtgtagatttttttnnnnnnnnnnaagcttggcgtggatccgatatcaactagatcttgagacaaatggcagtattcatccacaattttaaaagaaaaggggggattggggggtacagtgcaggggaaagaatagtagacataatagcaacagacatacaaactaaag

SEQ ID NO: 21511 - DNA, 301 bp, Artificial Sequence
  NTC.19_NTC.16
  crRNA array
  misc_feature (148)..(157): n is a, c, g, or t
cttggctttatatatcttgtggaaaggacgaaacaccgtaatttctactaagtgtagatcgtcgtagaacgatacccgataatttctactaagtgtagatcggtacgttagacgaaaatttaatttctactaagtgtagatttttttnnnnnnnnnnaagcttggcgtggatccgatatcaactagatcttgagacaaatggcagtattcatccacaattttaaaagaaaaggggggattggggggtacagtgcaggggaaagaatagtagacataatagcaacagacatacaaactaaag

SEQ ID NO: 21512 - DNA, 301 bp, Artificial Sequence
  NTC.19_NTC.4
  crRNA array
  misc_feature (148)..(157): n is a, c, g, or t
cttggctttatatatcttgtggaaaggacgaaacaccgtaatttctactaagtgtagatcgtcgtagaacgatacccgataatttctactaagtgtagatatacccgtcgcgaacgtgagtaatttctactaagtgtagatttttttnnnnnnnnnnaagcttggcgtggatccgatatcaactagatcttgagacaaatggcagtattcatccacaattttaaaagaaaaggggggattggggggtacagtgcaggggaaagaatagtagacataatagcaacagacatacaaactaaag

SEQ ID NO: 21513 - DNA, 301 bp, Artificial Sequence
  NTC.19_NTC.42
  crRNA array
  misc_feature (148)..(157): n is a, c, g, or t
cttggctttatatatcttgtggaaaggacgaaacaccgtaatttctactaagtgtagatcgtcgtagaacgatacccgataatttctactaagtgtagatggtcaaatcgcggcgataactaatttctactaagtgtagatttttttnnnnnnnnnnaagcttggcgtggatccgatatcaactagatcttgagacaaatggcagtattcatccacaattttaaaagaaaaggggggattggggggtacagtgcaggggaaagaatagtagacataatagcaacagacatacaaactaaag

SEQ ID NO: 21514 - DNA, 301 bp, Artificial Sequence
  NTC.19_NTC.22
  crRNA array
  misc_feature (148)..(157): n is a, c, g, or t
cttggctttatatatcttgtggaaaggacgaaacaccgtaatttctactaagtgtagatcgtcgtagaacgatacccgataatttctactaagtgtagatgcgcgtcaacgtaatgtgcctaatttctactaagtgtagatttttttnnnnnnnnnnaagcttggcgtggatccgatatcaactagatcttgagacaaatggcagtattcatccacaattttaaaagaaaaggggggattggggggtacagtgcaggggaaagaatagtagacataatagcaacagacatacaaactaaag

SEQ ID NO: 21515 - DNA, 301 bp, Artificial Sequence
  NTC.19_NTC.17
  crRNA array
  misc_feature (148)..(157): n is a, c, g, or t
cttggctttatatatcttgtggaaaggacgaaacaccgtaatttctactaagtgtagatcgtcgtagaacgatacccgataatttctactaagtgtagattatcgaacgctatcgaacgttaatttctactaagtgtagatttttttnnnnnnnnnnaagcttggcgtggatccgatatcaactagatcttgagacaaatggcagtattcatccacaattttaaaagaaaaggggggattggggggtacagtgcaggggaaagaatagtagacataatagcaacagacatacaaactaaag

SEQ ID NO: 21516 - DNA, 301 bp, Artificial Sequence
  NTC.19_NTC.9
  crRNA array
  misc_feature (148)..(157): n is a, c, g, or t
cttggctttatatatcttgtggaaaggacgaaacaccgtaatttctactaagtgtagatcgtcgtagaacgatacccgataatttctactaagtgtagatatcgccgtacggctatggcataatttctactaagtgtagatttttttnnnnnnnnnnaagcttggcgtggatccgatatcaactagatcttgagacaaatggcagtattcatccacaattttaaaagaaaaggggggattggggggtacagtgcaggggaaagaatagtagacataatagcaacagacatacaaactaaag

SEQ ID NO: 21517 - DNA, 301 bp, Artificial Sequence
  NTC.19_NTC.30
  crRNA array
  misc_feature (148)..(157): n is a, c, g, or t
cttggctttatatatcttgtggaaaggacgaaacaccgtaatttctactaagtgtagatcgtcgtagaacgatacccgataatttctactaagtgtagatcgatcgtacgggtgtcctaataatttctactaagtgtagatttttttnnnnnnnnnnaagcttggcgtggatccgatatcaactagatcttgagacaaatggcagtattcatccacaattttaaaagaaaaggggggattggggggtacagtgcaggggaaagaatagtagacataatagcaacagacatacaaactaaag

SEQ ID NO: 21518 - DNA, 301 bp, Artificial Sequence
  NTC.19_NTC.8
  crRNA array
  misc_feature (148)..(157): n is a, c, g, or t
cttggctttatatatcttgtggaaaggacgaaacaccgtaatttctactaagtgtagatcgtcgtagaacgatacccgataatttctactaagtgtagatcgaccgaggttacgctgggataatttctactaagtgtagatttttttnnnnnnnnnnaagcttggcgtggatccgatatcaactagatcttgagacaaatggcagtattcatccacaattttaaaagaaaaggggggattggggggtacagtgcaggggaaagaatagtagacataatagcaacagacatacaaactaaag

SEQ ID NO: 21519 - DNA, 301 bp, Artificial Sequence
  NTC.19_NTC.46
  crRNA array
  misc_feature (148)..(157): n is a, c, g, or t
cttggctttatatatcttgtggaaaggacgaaacaccgtaatttctactaagtgtagatcgtcgtagaacgatacccgataatttctactaagtgtagatagcgggtcgtagacgcgcggtaatttctactaagtgtagatttttttnnnnnnnnnnaagcttggcgtggatccgatatcaactagatcttgagacaaatggcagtattcatccacaattttaaaagaaaaggggggattggggggtacagtgcaggggaaagaatagtagacataatagcaacagacatacaaactaaag

SEQ ID NO: 21520 - DNA, 301 bp, Artificial Sequence
  NTC.19_NTC.35
  crRNA array
  misc_feature (148)..(157): n is a, c, g, or t
cttggctttatatatcttgtggaaaggacgaaacaccgtaatttctactaagtgtagatcgtcgtagaacgatacccgataatttctactaagtgtagattggcgcgtaatcgctattcgtaatttctactaagtgtagatttttttnnnnnnnnnnaagcttggcgtggatccgatatcaactagatcttgagacaaatggcagtattcatccacaattttaaaagaaaaggggggattggggggtacagtgcaggggaaagaatagtagacataatagcaacagacatacaaactaaag

SEQ ID NO: 21521 - DNA, 301 bp, Artificial Sequence
  NTC.19_NTC.10
  crRNA array
  misc_feature (148)..(157): n is a, c, g, or t
cttggctttatatatcttgtggaaaggacgaaacaccgtaatttctactaagtgtagatcgtcgtagaacgatacccgataatttctactaagtgtagatcgctaagttcgcgcgggccgtaatttctactaagtgtagatttttttnnnnnnnnnnaagcttggcgtggatccgatatcaactagatcttgagacaaatggcagtattcatccacaattttaaaagaaaaggggggattggggggtacagtgcaggggaaagaatagtagacataatagcaacagacatacaaactaaag

SEQ ID NO: 21522 - DNA, 301 bp, Artificial Sequence
  NTC.19_NTC.11
  crRNA array
  misc_feature (148)..(157): n is a, c, g, or t
cttggctttatatatcttgtggaaaggacgaaacaccgtaatttctactaagtgtagatcgtcgtagaacgatacccgataatttctactaagtgtagatcgttcgtcgacgaagcaatctaatttctactaagtgtagatttttttnnnnnnnnnnaagcttggcgtggatccgatatcaactagatcttgagacaaatggcagtattcatccacaattttaaaagaaaaggggggattggggggtacagtgcaggggaaagaatagtagacataatagcaacagacatacaaactaaag

SEQ ID NO: 21523 - DNA, 301 bp, Artificial Sequence
  NTC.19_NTC.14
  crRNA array
  misc_feature (148)..(157): n is a, c, g, or t
cttggctttatatatcttgtggaaaggacgaaacaccgtaatttctactaagtgtagatcgtcgtagaacgatacccgataatttctactaagtgtagatccgttcgtgcgatagtgttttaatttctactaagtgtagatttttttnnnnnnnnnnaagcttggcgtggatccgatatcaactagatcttgagacaaatggcagtattcatccacaattttaaaagaaaaggggggattggggggtacagtgcaggggaaagaatagtagacataatagcaacagacatacaaactaaag

SEQ ID NO: 21524 - DNA, 301 bp, Artificial Sequence
  NTC.19_NTC.28
  crRNA array
  misc_feature (148)..(157): n is a, c, g, or t
cttggctttatatatcttgtggaaaggacgaaacaccgtaatttctactaagtgtagatcgtcgtagaacgatacccgataatttctactaagtgtagataccgctaatcggcgtaaacttaatttctactaagtgtagatttttttnnnnnnnnnnaagcttggcgtggatccgatatcaactagatcttgagacaaatggcagtattcatccacaattttaaaagaaaaggggggattggggggtacagtgcaggggaaagaatagtagacataatagcaacagacatacaaactaaag

SEQ ID NO: 21525 - DNA, 301 bp, Artificial Sequence
  NTC.20_NTC.48
  crRNA array
  misc_feature (148)..(157): n is a, c, g, or t
cttggctttatatatcttgtggaaaggacgaaacaccgtaatttctactaagtgtagatattccggcgcgaccagaagataatttctactaagtgtagatcggtcgactacggctgttagtaatttctactaagtgtagatttttttnnnnnnnnnnaagcttggcgtggatccgatatcaactagatcttgagacaaatggcagtattcatccacaattttaaaagaaaaggggggattggggggtacagtgcaggggaaagaatagtagacataatagcaacagacatacaaactaaag

SEQ ID NO: 21526 - DNA, 301 bp, Artificial Sequence
  NTC.20_NTC.26
  crRNA array
  misc_feature (148)..(157): n is a, c, g, or t
cttggctttatatatcttgtggaaaggacgaaacaccgtaatttctactaagtgtagatattccggcgcgaccagaagataatttctactaagtgtagatcgcgacggcggttttaacactaatttctactaagtgtagatttttttnnnnnnnnnnaagcttggcgtggatccgatatcaactagatcttgagacaaatggcagtattcatccacaattttaaaagaaaaggggggattggggggtacagtgcaggggaaagaatagtagacataatagcaacagacatacaaactaaag

SEQ ID NO: 21527 - DNA, 301 bp, Artificial Sequence
  NTC.20_NTC.27
  crRNA array
  misc_feature (148)..(157): n is a, c, g, or t
cttggctttatatatcttgtggaaaggacgaaacaccgtaatttctactaagtgtagatattccggcgcgaccagaagataatttctactaagtgtagatgtcgcgttgcgaccggcgcttaatttctactaagtgtagatttttttnnnnnnnnnnaagcttggcgtggatccgatatcaactagatcttgagacaaatggcagtattcatccacaattttaaaagaaaaggggggattggggggtacagtgcaggggaaagaatagtagacataatagcaacagacatacaaactaaag

SEQ ID NO: 21528 - DNA, 301 bp, Artificial Sequence
  NTC.20_NTC.34
  crRNA array
  misc_feature (148)..(157): n is a, c, g, or t
cttggctttatatatcttgtggaaaggacgaaacaccgtaatttctactaagtgtagatattccggcgcgaccagaagataatttctactaagtgtagattagcgttcgacacgtgaaactaatttctactaagtgtagatttttttnnnnnnnnnnaagcttggcgtggatccgatatcaactagatcttgagacaaatggcagtattcatccacaattttaaaagaaaaggggggattggggggtacagtgcaggggaaagaatagtagacataatagcaacagacatacaaactaaag

SEQ ID NO: 21529 - DNA, 301 bp, Artificial Sequence
  NTC.20_NTC.16
  crRNA array
  misc_feature (148)..(157): n is a, c, g, or t
cttggctttatatatcttgtggaaaggacgaaacaccgtaatttctactaagtgtagatattccggcgcgaccagaagataatttctactaagtgtagatcggtacgttagacgaaaatttaatttctactaagtgtagatttttttnnnnnnnnnnaagcttggcgtggatccgatatcaactagatcttgagacaaatggcagtattcatccacaattttaaaagaaaaggggggattggggggtacagtgcaggggaaagaatagtagacataatagcaacagacatacaaactaaag

SEQ ID NO: 21530 - DNA, 301 bp, Artificial Sequence
  NTC.20_NTC.4
  crRNA array
  misc_feature (148)..(157): n is a, c, g, or t
cttggctttatatatcttgtggaaaggacgaaacaccgtaatttctactaagtgtagatattccggcgcgaccagaagataatttctactaagtgtagatatacccgtcgcgaacgtgagtaatttctactaagtgtagatttttttnnnnnnnnnnaagcttggcgtggatccgatatcaactagatcttgagacaaatggcagtattcatccacaattttaaaagaaaaggggggattggggggtacagtgcaggggaaagaatagtagacataatagcaacagacatacaaactaaag

SEQ ID NO: 21531 - DNA, 301 bp, Artificial Sequence
  NTC.20_NTC.42
  crRNA array
  misc_feature (148)..(157): n is a, c, g, or t
cttggctttatatatcttgtggaaaggacgaaacaccgtaatttctactaagtgtagatattccggcgcgaccagaagataatttctactaagtgtagatggtcaaatcgcggcgataactaatttctactaagtgtagatttttttnnnnnnnnnnaagcttggcgtggatccgatatcaactagatcttgagacaaatggcagtattcatccacaattttaaaagaaaaggggggattggggggtacagtgcaggggaaagaatagtagacataatagcaacagacatacaaactaaag

SEQ ID NO: 21532 - DNA, 301 bp, Artificial Sequence
  NTC.20_NTC.22
  crRNA array
  misc_feature (148)..(157): n is a, c, g, or t
cttggctttatatatcttgtggaaaggacgaaacaccgtaatttctactaagtgtagatattccggcgcgaccagaagataatttctactaagtgtagatgcgcgtcaacgtaatgtgcctaatttctactaagtgtagatttttttnnnnnnnnnnaagcttggcgtggatccgatatcaactagatcttgagacaaatggcagtattcatccacaattttaaaagaaaaggggggattggggggtacagtgcaggggaaagaatagtagacataatagcaacagacatacaaactaaag

SEQ ID NO: 21533 - DNA, 301 bp, Artificial Sequence
  NTC.20_NTC.17
  crRNA array
  misc_feature (148)..(157): n is a, c, g, or t
cttggctttatatatcttgtggaaaggacgaaacaccgtaatttctactaagtgtagatattccggcgcgaccagaagataatttctactaagtgtagattatcgaacgctatcgaacgttaatttctactaagtgtagatttttttnnnnnnnnnnaagcttggcgtggatccgatatcaactagatcttgagacaaatggcagtattcatccacaattttaaaagaaaaggggggattggggggtacagtgcaggggaaagaatagtagacataatagcaacagacatacaaactaaag

SEQ ID NO: 21534 - DNA, 301 bp, Artificial Sequence
  NTC.20_NTC.9
  crRNA array
  misc_feature (148)..(157): n is a, c, g, or t
cttggctttatatatcttgtggaaaggacgaaacaccgtaatttctactaagtgtagatattccggcgcgaccagaagataatttctactaagtgtagatatcgccgtacggctatggcataatttctactaagtgtagatttttttnnnnnnnnnnaagcttggcgtggatccgatatcaactagatcttgagacaaatggcagtattcatccacaattttaaaagaaaaggggggattggggggtacagtgcaggggaaagaatagtagacataatagcaacagacatacaaactaaag

SEQ ID NO: 21535 - DNA, 301 bp, Artificial Sequence
  NTC.20_NTC.30
  crRNA array
  misc_feature (148)..(157): n is a, c, g, or t
cttggctttatatatcttgtggaaaggacgaaacaccgtaatttctactaagtgtagatattccggcgcgaccagaagataatttctactaagtgtagatcgatcgtacgggtgtcctaataatttctactaagtgtagatttttttnnnnnnnnnnaagcttggcgtggatccgatatcaactagatcttgagacaaatggcagtattcatccacaattttaaaagaaaaggggggattggggggtacagtgcaggggaaagaatagtagacataatagcaacagacatacaaactaaag

SEQ ID NO: 21536 - DNA, 301 bp, Artificial Sequence
  NTC.20_NTC.8
  crRNA array
  misc_feature (148)..(157): n is a, c, g, or t
cttggctttatatatcttgtggaaaggacgaaacaccgtaatttctactaagtgtagatattccggcgcgaccagaagataatttctactaagtgtagatcgaccgaggttacgctgggataatttctactaagtgtagatttttttnnnnnnnnnnaagcttggcgtggatccgatatcaactagatcttgagacaaatggcagtattcatccacaattttaaaagaaaaggggggattggggggtacagtgcaggggaaagaatagtagacataatagcaacagacatacaaactaaag

SEQ ID NO: 21537 - DNA, 301 bp, Artificial Sequence
  NTC.20_NTC.46
  crRNA array
  misc_feature (148)..(157): n is a, c, g, or t
cttggctttatatatcttgtggaaaggacgaaacaccgtaatttctactaagtgtagatattccggcgcgaccagaagataatttctactaagtgtagatagcgggtcgtagacgcgcggtaatttctactaagtgtagatttttttnnnnnnnnnnaagcttggcgtggatccgatatcaactagatcttgagacaaatggcagtattcatccacaattttaaaagaaaaggggggattggggggtacagtgcaggggaaagaatagtagacataatagcaacagacatacaaactaaag

SEQ ID NO: 21538 - DNA, 301 bp, Artificial Sequence
  NTC.20_NTC.35
  crRNA array
  misc_feature (148)..(157): n is a, c, g, or t
cttggctttatatatcttgtggaaaggacgaaacaccgtaatttctactaagtgtagatattccggcgcgaccagaagataatttctactaagtgtagattggcgcgtaatcgctattcgtaatttctactaagtgtagatttttttnnnnnnnnnnaagcttggcgtggatccgatatcaactagatcttgagacaaatggcagtattcatccacaattttaaaagaaaaggggggattggggggtacagtgcaggggaaagaatagtagacataatagcaacagacatacaaactaaag

SEQ ID NO: 21539 - DNA, 301 bp, Artificial Sequence
  NTC.20_NTC.10
  crRNA array
  misc_feature (148)..(157): n is a, c, g, or t
cttggctttatatatcttgtggaaaggacgaaacaccgtaatttctactaagtgtagatattccggcgcgaccagaagataatttctactaagtgtagatcgctaagttcgcgcgggccgtaatttctactaagtgtagatttttttnnnnnnnnnnaagcttggcgtggatccgatatcaactagatcttgagacaaatggcagtattcatccacaattttaaaagaaaaggggggattggggggtacagtgcaggggaaagaatagtagacataatagcaacagacatacaaactaaag

SEQ ID NO: 21540 - DNA, 301 bp, Artificial Sequence
  NTC.20_NTC.11
  crRNA array
  misc_feature (148)..(157): n is a, c, g, or t
cttggctttatatatcttgtggaaaggacgaaacaccgtaatttctactaagtgtagatattccggcgcgaccagaagataatttctactaagtgtagatcgttcgtcgacgaagcaatctaatttctactaagtgtagatttttttnnnnnnnnnnaagcttggcgtggatccgatatcaactagatcttgagacaaatggcagtattcatccacaattttaaaagaaaaggggggattggggggtacagtgcaggggaaagaatagtagacataatagcaacagacatacaaactaaag

SEQ ID NO: 21541 - DNA, 301 bp, Artificial Sequence
  NTC.20_NTC.14
  crRNA array
  misc_feature (148)..(157): n is a, c, g, or t
cttggctttatatatcttgtggaaaggacgaaacaccgtaatttctactaagtgtagatattccggcgcgaccagaagataatttctactaagtgtagatccgttcgtgcgatagtgttttaatttctactaagtgtagatttttttnnnnnnnnnnaagcttggcgtggatccgatatcaactagatcttgagacaaatggcagtattcatccacaattttaaaagaaaaggggggattggggggtacagtgcaggggaaagaatagtagacataatagcaacagacatacaaactaaag

SEQ ID NO: 21542 - DNA, 301 bp, Artificial Sequence
  NTC.20_NTC.28
  crRNA array
  misc_feature (148)..(157): n is a, c, g, or t
cttggctttatatatcttgtggaaaggacgaaacaccgtaatttctactaagtgtagatattccggcgcgaccagaagataatttctactaagtgtagataccgctaatcggcgtaaacttaatttctactaagtgtagatttttttnnnnnnnnnnaagcttggcgtggatccgatatcaactagatcttgagacaaatggcagtattcatccacaattttaaaagaaaaggggggattggggggtacagtgcaggggaaagaatagtagacataatagcaacagacatacaaactaaag

SEQ ID NO: 21543 - DNA, 301 bp, Artificial Sequence
  NTC.48_NTC.26
  crRNA array
  misc_feature (148)..(157): n is a, c, g, or t
cttggctttatatatcttgtggaaaggacgaaacaccgtaatttctactaagtgtagatcggtcgactacggctgttagtaatttctactaagtgtagatcgcgacggcggttttaacactaatttctactaagtgtagatttttttnnnnnnnnnnaagcttggcgtggatccgatatcaactagatcttgagacaaatggcagtattcatccacaattttaaaagaaaaggggggattggggggtacagtgcaggggaaagaatagtagacataatagcaacagacatacaaactaaag

SEQ ID NO: 21544 - DNA, 301 bp, Artificial Sequence
  NTC.48_NTC.27
  crRNA array
  misc_feature (148)..(157): n is a, c, g, or t
cttggctttatatatcttgtggaaaggacgaaacaccgtaatttctactaagtgtagatcggtcgactacggctgttagtaatttctactaagtgtagatgtcgcgttgcgaccggcgcttaatttctactaagtgtagatttttttnnnnnnnnnnaagcttggcgtggatccgatatcaactagatcttgagacaaatggcagtattcatccacaattttaaaagaaaaggggggattggggggtacagtgcaggggaaagaatagtagacataatagcaacagacatacaaactaaag

SEQ ID NO: 21545 - DNA, 301 bp, Artificial Sequence
  NTC.48_NTC.34
  crRNA array
  misc_feature (148)..(157): n is a, c, g, or t
cttggctttatatatcttgtggaaaggacgaaacaccgtaatttctactaagtgtagatcggtcgactacggctgttagtaatttctactaagtgtagattagcgttcgacacgtgaaactaatttctactaagtgtagatttttttnnnnnnnnnnaagcttggcgtggatccgatatcaactagatcttgagacaaatggcagtattcatccacaattttaaaagaaaaggggggattggggggtacagtgcaggggaaagaatagtagacataatagcaacagacatacaaactaaag

SEQ ID NO: 21546 - DNA, 301 bp, Artificial Sequence
  NTC.48_NTC.16
  crRNA array
  misc_feature (148)..(157): n is a, c, g, or t
cttggctttatatatcttgtggaaaggacgaaacaccgtaatttctactaagtgtagatcggtcgactacggctgttagtaatttctactaagtgtagatcggtacgttagacgaaaatttaatttctactaagtgtagatttttttnnnnnnnnnnaagcttggcgtggatccgatatcaactagatcttgagacaaatggcagtattcatccacaattttaaaagaaaaggggggattggggggtacagtgcaggggaaagaatagtagacataatagcaacagacatacaaactaaag

SEQ ID NO: 21547 - DNA, 301 bp, Artificial Sequence
  NTC.48_NTC.4
  crRNA array
  misc_feature (148)..(157): n is a, c, g, or t
cttggctttatatatcttgtggaaaggacgaaacaccgtaatttctactaagtgtagatcggtcgactacggctgttagtaatttctactaagtgtagatatacccgtcgcgaacgtgagtaatttctactaagtgtagatttttttnnnnnnnnnnaagcttggcgtggatccgatatcaactagatcttgagacaaatggcagtattcatccacaattttaaaagaaaaggggggattggggggtacagtgcaggggaaagaatagtagacataatagcaacagacatacaaactaaag

SEQ ID NO: 21548 - DNA, 301 bp, Artificial Sequence
  NTC.48_NTC.42
  crRNA array
  misc_feature (148)..(157): n is a, c, g, or t
cttggctttatatatcttgtggaaaggacgaaacaccgtaatttctactaagtgtagatcggtcgactacggctgttagtaatttctactaagtgtagatggtcaaatcgcggcgataactaatttctactaagtgtagatttttttnnnnnnnnnnaagcttggcgtggatccgatatcaactagatcttgagacaaatggcagtattcatccacaattttaaaagaaaaggggggattggggggtacagtgcaggggaaagaatagtagacataatagcaacagacatacaaactaaag

SEQ ID NO: 21549 - DNA, 301 bp, Artificial Sequence
  NTC.48_NTC.22
  crRNA array
  misc_feature (148)..(157): n is a, c, g, or t
cttggctttatatatcttgtggaaaggacgaaacaccgtaatttctactaagtgtagatcggtcgactacggctgttagtaatttctactaagtgtagatgcgcgtcaacgtaatgtgcctaatttctactaagtgtagatttttttnnnnnnnnnnaagcttggcgtggatccgatatcaactagatcttgagacaaatggcagtattcatccacaattttaaaagaaaaggggggattggggggtacagtgcaggggaaagaatagtagacataatagcaacagacatacaaactaaag

SEQ ID NO: 21550 - DNA, 301 bp, Artificial Sequence
  NTC.48_NTC.17
  crRNA array
  misc_feature (148)..(157): n is a, c, g, or t
cttggctttatatatcttgtggaaaggacgaaacaccgtaatttctactaagtgtagatcggtcgactacggctgttagtaatttctactaagtgtagattatcgaacgctatcgaacgttaatttctactaagtgtagatttttttnnnnnnnnnnaagcttggcgtggatccgatatcaactagatcttgagacaaatggcagtattcatccacaattttaaaagaaaaggggggattggggggtacagtgcaggggaaagaatagtagacataatagcaacagacatacaaactaaag

SEQ ID NO: 21551 - DNA, 301 bp, Artificial Sequence
  NTC.48_NTC.9
  crRNA array
  misc_feature (148)..(157): n is a, c, g, or t
cttggctttatatatcttgtggaaaggacgaaacaccgtaatttctactaagtgtagatcggtcgactacggctgttagtaatttctactaagtgtagatatcgccgtacggctatggcataatttctactaagtgtagatttttttnnnnnnnnnnaagcttggcgtggatccgatatcaactagatcttgagacaaatggcagtattcatccacaattttaaaagaaaaggggggattggggggtacagtgcaggggaaagaatagtagacataatagcaacagacatacaaactaaag

SEQ ID NO: 21552 - DNA, 301 bp, Artificial Sequence
  NTC.48_NTC.30
  crRNA array
  misc_feature (148)..(157): n is a, c, g, or t
cttggctttatatatcttgtggaaaggacgaaacaccgtaatttctactaagtgtagatcggtcgactacggctgttagtaatttctactaagtgtagatcgatcgtacgggtgtcctaataatttctactaagtgtagatttttttnnnnnnnnnnaagcttggcgtggatccgatatcaactagatcttgagacaaatggcagtattcatccacaattttaaaagaaaaggggggattggggggtacagtgcaggggaaagaatagtagacataatagcaacagacatacaaactaaag

SEQ ID NO: 21553 - DNA, 301 bp, Artificial Sequence
  NTC.48_NTC.8
  crRNA array
  misc_feature (148)..(157): n is a, c, g, or t
cttggctttatatatcttgtggaaaggacgaaacaccgtaatttctactaagtgtagatcggtcgactacggctgttagtaatttctactaagtgtagatcgaccgaggttacgctgggataatttctactaagtgtagatttttttnnnnnnnnnnaagcttggcgtggatccgatatcaactagatcttgagacaaatggcagtattcatccacaattttaaaagaaaaggggggattggggggtacagtgcaggggaaagaatagtagacataatagcaacagacatacaaactaaag

SEQ ID NO: 21554 - DNA, 301 bp, Artificial Sequence
  NTC.48_NTC.46
  crRNA array
  misc_feature (148)..(157): n is a, c, g, or t
cttggctttatatatcttgtggaaaggacgaaacaccgtaatttctactaagtgtagatcggtcgactacggctgttagtaatttctactaagtgtagatagcgggtcgtagacgcgcggtaatttctactaagtgtagatttttttnnnnnnnnnnaagcttggcgtggatccgatatcaactagatcttgagacaaatggcagtattcatccacaattttaaaagaaaaggggggattggggggtacagtgcaggggaaagaatagtagacataatagcaacagacatacaaactaaag

SEQ ID NO: 21555 - DNA, 301 bp, Artificial Sequence
  NTC.48_NTC.35
  crRNA array
  misc_feature (148)..(157): n is a, c, g, or t
cttggctttatatatcttgtggaaaggacgaaacaccgtaatttctactaagtgtagatcggtcgactacggctgttagtaatttctactaagtgtagattggcgcgtaatcgctattcgtaatttctactaagtgtagatttttttnnnnnnnnnnaagcttggcgtggatccgatatcaactagatcttgagacaaatggcagtattcatccacaattttaaaagaaaaggggggattggggggtacagtgcaggggaaagaatagtagacataatagcaacagacatacaaactaaag

SEQ ID NO: 21556 - DNA, 301 bp, Artificial Sequence
  NTC.48_NTC.10
  crRNA array
  misc_feature (148)..(157): n is a, c, g, or t
cttggctttatatatcttgtggaaaggacgaaacaccgtaatttctactaagtgtagatcggtcgactacggctgttagtaatttctactaagtgtagatcgctaagttcgcgcgggccgtaatttctactaagtgtagatttttttnnnnnnnnnnaagcttggcgtggatccgatatcaactagatcttgagacaaatggcagtattcatccacaattttaaaagaaaaggggggattggggggtacagtgcaggggaaagaatagtagacataatagcaacagacatacaaactaaag

SEQ ID NO: 21557 - DNA, 301 bp, Artificial Sequence
  NTC.48_NTC.11
  crRNA array
  misc_feature (148)..(157): n is a, c, g, or t
cttggctttatatatcttgtggaaaggacgaaacaccgtaatttctactaagtgtagatcggtcgactacggctgttagtaatttctactaagtgtagatcgttcgtcgacgaagcaatctaatttctactaagtgtagatttttttnnnnnnnnnnaagcttggcgtggatccgatatcaactagatcttgagacaaatggcagtattcatccacaattttaaaagaaaaggggggattggggggtacagtgcaggggaaagaatagtagacataatagcaacagacatacaaactaaag

SEQ ID NO: 21558 - DNA, 301 bp, Artificial Sequence
  NTC.48_NTC.14
  crRNA array
  misc_feature (148)..(157): n is a, c, g, or t
cttggctttatatatcttgtggaaaggacgaaacaccgtaatttctactaagtgtagatcggtcgactacggctgttagtaatttctactaagtgtagatccgttcgtgcgatagtgttttaatttctactaagtgtagatttttttnnnnnnnnnnaagcttggcgtggatccgatatcaactagatcttgagacaaatggcagtattcatccacaattttaaaagaaaaggggggattggggggtacagtgcaggggaaagaatagtagacataatagcaacagacatacaaactaaag

SEQ ID NO: 21559 - DNA, 301 bp, Artificial Sequence
  NTC.48_NTC.28
  crRNA array
  misc_feature (148)..(157): n is a, c, g, or t
cttggctttatatatcttgtggaaaggacgaaacaccgtaatttctactaagtgtagatcggtcgactacggctgttagtaatttctactaagtgtagataccgctaatcggcgtaaacttaatttctactaagtgtagatttttttnnnnnnnnnnaagcttggcgtggatccgatatcaactagatcttgagacaaatggcagtattcatccacaattttaaaagaaaaggggggattggggggtacagtgcaggggaaagaatagtagacataatagcaacagacatacaaactaaag

SEQ ID NO: 21560 - DNA, 301 bp, Artificial Sequence
  NTC.26_NTC.27
  crRNA array
  misc_feature (148)..(157): n is a, c, g, or t
cttggctttatatatcttgtggaaaggacgaaacaccgtaatttctactaagtgtagatcgcgacggcggttttaacactaatttctactaagtgtagatgtcgcgttgcgaccggcgcttaatttctactaagtgtagatttttttnnnnnnnnnnaagcttggcgtggatccgatatcaactagatcttgagacaaatggcagtattcatccacaattttaaaagaaaaggggggattggggggtacagtgcaggggaaagaatagtagacataatagcaacagacatacaaactaaag

SEQ ID NO: 21561 - DNA, 301 bp, Artificial Sequence
  NTC.26_NTC.34
  crRNA array
  misc_feature (148)..(157): n is a, c, g, or t
cttggctttatatatcttgtggaaaggacgaaacaccgtaatttctactaagtgtagatcgcgacggcggttttaacactaatttctactaagtgtagattagcgttcgacacgtgaaactaatttctactaagtgtagatttttttnnnnnnnnnnaagcttggcgtggatccgatatcaactagatcttgagacaaatggcagtattcatccacaattttaaaagaaaaggggggattggggggtacagtgcaggggaaagaatagtagacataatagcaacagacatacaaactaaag

SEQ ID NO: 21562 - DNA, 301 bp, Artificial Sequence
  NTC.26_NTC.16
  crRNA array
  misc_feature (148)..(157): n is a, c, g, or t
cttggctttatatatcttgtggaaaggacgaaacaccgtaatttctactaagtgtagatcgcgacggcggttttaacactaatttctactaagtgtagatcggtacgttagacgaaaatttaatttctactaagtgtagatttttttnnnnnnnnnnaagcttggcgtggatccgatatcaactagatcttgagacaaatggcagtattcatccacaattttaaaagaaaaggggggattggggggtacagtgcaggggaaagaatagtagacataatagcaacagacatacaaactaaag

SEQ ID NO: 21563 - DNA, 301 bp, Artificial Sequence
  NTC.26_NTC.4
  crRNA array
  misc_feature (148)..(157): n is a, c, g, or t
cttggctttatatatcttgtggaaaggacgaaacaccgtaatttctactaagtgtagatcgcgacggcggttttaacactaatttctactaagtgtagatatacccgtcgcgaacgtgagtaatttctactaagtgtagatttttttnnnnnnnnnnaagcttggcgtggatccgatatcaactagatcttgagacaaatggcagtattcatccacaattttaaaagaaaaggggggattggggggtacagtgcaggggaaagaatagtagacataatagcaacagacatacaaactaaag

SEQ ID NO: 21564 - DNA, 301 bp, Artificial Sequence
  NTC.26_NTC.42
  crRNA array
  misc_feature (148)..(157): n is a, c, g, or t
cttggctttatatatcttgtggaaaggacgaaacaccgtaatttctactaagtgtagatcgcgacggcggttttaacactaatttctactaagtgtagatggtcaaatcgcggcgataactaatttctactaagtgtagatttttttnnnnnnnnnnaagcttggcgtggatccgatatcaactagatcttgagacaaatggcagtattcatccacaattttaaaagaaaaggggggattggggggtacagtgcaggggaaagaatagtagacataatagcaacagacatacaaactaaag

SEQ ID NO: 21565 - DNA, 301 bp, Artificial Sequence
  NTC.26_NTC.22
  crRNA array
  misc_feature (148)..(157): n is a, c, g, or t
cttggctttatatatcttgtggaaaggacgaaacaccgtaatttctactaagtgtagatcgcgacggcggttttaacactaatttctactaagtgtagatgcgcgtcaacgtaatgtgcctaatttctactaagtgtagatttttttnnnnnnnnnnaagcttggcgtggatccgatatcaactagatcttgagacaaatggcagtattcatccacaattttaaaagaaaaggggggattggggggtacagtgcaggggaaagaatagtagacataatagcaacagacatacaaactaaag

SEQ ID NO: 21566 - DNA, 301 bp, Artificial Sequence
  NTC.26_NTC.17
  crRNA array
  misc_feature (148)..(157): n is a, c, g, or t
cttggctttatatatcttgtggaaaggacgaaacaccgtaatttctactaagtgtagatcgcgacggcggttttaacactaatttctactaagtgtagattatcgaacgctatcgaacgttaatttctactaagtgtagatttttttnnnnnnnnnnaagcttggcgtggatccgatatcaactagatcttgagacaaatggcagtattcatccacaattttaaaagaaaaggggggattggggggtacagtgcaggggaaagaatagtagacataatagcaacagacatacaaactaaag

SEQ ID NO: 21567 - DNA, 301 bp, Artificial Sequence
  NTC.26_NTC.9
  crRNA array
  misc_feature (148)..(157): n is a, c, g, or t
cttggctttatatatcttgtggaaaggacgaaacaccgtaatttctactaagtgtagatcgcgacggcggttttaacactaatttctactaagtgtagatatcgccgtacggctatggcataatttctactaagtgtagatttttttnnnnnnnnnnaagcttggcgtggatccgatatcaactagatcttgagacaaatggcagtattcatccacaattttaaaagaaaaggggggattggggggtacagtgcaggggaaagaatagtagacataatagcaacagacatacaaactaaag

SEQ ID NO: 21568 - DNA, 301 bp, Artificial Sequence
  NTC.26_NTC.30
  crRNA array
  misc_feature (148)..(157): n is a, c, g, or t
cttggctttatatatcttgtggaaaggacgaaacaccgtaatttctactaagtgtagatcgcgacggcggttttaacactaatttctactaagtgtagatcgatcgtacgggtgtcctaataatttctactaagtgtagatttttttnnnnnnnnnnaagcttggcgtggatccgatatcaactagatcttgagacaaatggcagtattcatccacaattttaaaagaaaaggggggattggggggtacagtgcaggggaaagaatagtagacataatagcaacagacatacaaactaaag

SEQ ID NO: 21569 - DNA, 301 bp, Artificial Sequence
  NTC.26_NTC.8
  crRNA array
  misc_feature (148)..(157): n is a, c, g, or t
cttggctttatatatcttgtggaaaggacgaaacaccgtaatttctactaagtgtagatcgcgacggcggttttaacactaatttctactaagtgtagatcgaccgaggttacgctgggataatttctactaagtgtagatttttttnnnnnnnnnnaagcttggcgtggatccgatatcaactagatcttgagacaaatggcagtattcatccacaattttaaaagaaaaggggggattggggggtacagtgcaggggaaagaatagtagacataatagcaacagacatacaaactaaag

SEQ ID NO: 21570 - DNA, 301 bp, Artificial Sequence
  NTC.26_NTC.46
  crRNA array
  misc_feature (148)..(157): n is a, c, g, or t
cttggctttatatatcttgtggaaaggacgaaacaccgtaatttctactaagtgtagatcgcgacggcggttttaacactaatttctactaagtgtagatagcgggtcgtagacgcgcggtaatttctactaagtgtagatttttttnnnnnnnnnnaagcttggcgtggatccgatatcaactagatcttgagacaaatggcagtattcatccacaattttaaaagaaaaggggggattggggggtacagtgcaggggaaagaatagtagacataatagcaacagacatacaaactaaag

SEQ ID NO: 21571 - DNA, 301 bp, Artificial Sequence
  NTC.26_NTC.35
  crRNA array
  misc_feature (148)..(157): n is a, c, g, or t
cttggctttatatatcttgtggaaaggacgaaacaccgtaatttctactaagtgtagatcgcgacggcggttttaacactaatttctactaagtgtagattggcgcgtaatcgctattcgtaatttctactaagtgtagatttttttnnnnnnnnnnaagcttggcgtggatccgatatcaactagatcttgagacaaatggcagtattcatccacaattttaaaagaaaaggggggattggggggtacagtgcaggggaaagaatagtagacataatagcaacagacatacaaactaaag

SEQ ID NO: 21572 - DNA, 301 bp, Artificial Sequence
  NTC.26_NTC.10
  crRNA array
  misc_feature (148)..(157): n is a, c, g, or t
cttggctttatatatcttgtggaaaggacgaaacaccgtaatttctactaagtgtagatcgcgacggcggttttaacactaatttctactaagtgtagatcgctaagttcgcgcgggccgtaatttctactaagtgtagatttttttnnnnnnnnnnaagcttggcgtggatccgatatcaactagatcttgagacaaatggcagtattcatccacaattttaaaagaaaaggggggattggggggtacagtgcaggggaaagaatagtagacataatagcaacagacatacaaactaaag

SEQ ID NO: 21573 - DNA, 301 bp, Artificial Sequence
  NTC.26_NTC.11
  crRNA array
  misc_feature (148)..(157): n is a, c, g, or t
cttggctttatatatcttgtggaaaggacgaaacaccgtaatttctactaagtgtagatcgcgacggcggttttaacactaatttctactaagtgtagatcgttcgtcgacgaagcaatctaatttctactaagtgtagatttttttnnnnnnnnnnaagcttggcgtggatccgatatcaactagatcttgagacaaatggcagtattcatccacaattttaaaagaaaaggggggattggggggtacagtgcaggggaaagaatagtagacataatagcaacagacatacaaactaaag

SEQ ID NO: 21574 - DNA, 301 bp, Artificial Sequence
  NTC.26_NTC.14
  crRNA array
  misc_feature (148)..(157): n is a, c, g, or t
cttggctttatatatcttgtggaaaggacgaaacaccgtaatttctactaagtgtagatcgcgacggcggttttaacactaatttctactaagtgtagatccgttcgtgcgatagtgttttaatttctactaagtgtagatttttttnnnnnnnnnnaagcttggcgtggatccgatatcaactagatcttgagacaaatggcagtattcatccacaattttaaaagaaaaggggggattggggggtacagtgcaggggaaagaatagtagacataatagcaacagacatacaaactaaag

SEQ ID NO: 21575 - DNA, 301 bp, Artificial Sequence
  NTC.26_NTC.28
  crRNA array
  misc_feature (148)..(157): n is a, c, g, or t
cttggctttatatatcttgtggaaaggacgaaacaccgtaatttctactaagtgtagatcgcgacggcggttttaacactaatttctactaagtgtagataccgctaatcggcgtaaacttaatttctactaagtgtagatttttttnnnnnnnnnnaagcttggcgtggatccgatatcaactagatcttgagacaaatggcagtattcatccacaattttaaaagaaaaggggggattggggggtacagtgcaggggaaagaatagtagacataatagcaacagacatacaaactaaag

SEQ ID NO: 21576 - DNA, 301 bp, Artificial Sequence
  NTC.27_NTC.34
  crRNA array
  misc_feature (148)..(157): n is a, c, g, or t
cttggctttatatatcttgtggaaaggacgaaacaccgtaatttctactaagtgtagatgtcgcgttgcgaccggcgcttaatttctactaagtgtagattagcgttcgacacgtgaaactaatttctactaagtgtagatttttttnnnnnnnnnnaagcttggcgtggatccgatatcaactagatcttgagacaaatggcagtattcatccacaattttaaaagaaaaggggggattggggggtacagtgcaggggaaagaatagtagacataatagcaacagacatacaaactaaag

SEQ ID NO: 21577 - DNA, 301 bp, Artificial Sequence
  NTC.27_NTC.16
  crRNA array
  misc_feature (148)..(157): n is a, c, g, or t
cttggctttatatatcttgtggaaaggacgaaacaccgtaatttctactaagtgtagatgtcgcgttgcgaccggcgcttaatttctactaagtgtagatcggtacgttagacgaaaatttaatttctactaagtgtagatttttttnnnnnnnnnnaagcttggcgtggatccgatatcaactagatcttgagacaaatggcagtattcatccacaattttaaaagaaaaggggggattggggggtacagtgcaggggaaagaatagtagacataatagcaacagacatacaaactaaag

SEQ ID NO: 21578 - DNA, 301 bp, Artificial Sequence
  NTC.27_NTC.4
  crRNA array
  misc_feature (148)..(157): n is a, c, g, or t
cttggctttatatatcttgtggaaaggacgaaacaccgtaatttctactaagtgtagatgtcgcgttgcgaccggcgcttaatttctactaagtgtagatatacccgtcgcgaacgtgagtaatttctactaagtgtagatttttttnnnnnnnnnnaagcttggcgtggatccgatatcaactagatcttgagacaaatggcagtattcatccacaattttaaaagaaaaggggggattggggggtacagtgcaggggaaagaatagtagacataatagcaacagacatacaaactaaag

SEQ ID NO: 21579 - DNA, 301 bp, Artificial Sequence
  NTC.27_NTC.42
  crRNA array
  misc_feature (148)..(157): n is a, c, g, or t
cttggctttatatatcttgtggaaaggacgaaacaccgtaatttctactaagtgtagatgtcgcgttgcgaccggcgcttaatttctactaagtgtagatggtcaaatcgcggcgataactaatttctactaagtgtagatttttttnnnnnnnnnnaagcttggcgtggatccgatatcaactagatcttgagacaaatggcagtattcatccacaattttaaaagaaaaggggggattggggggtacagtgcaggggaaagaatagtagacataatagcaacagacatacaaactaaag

SEQ ID NO: 21580 - DNA, 301 bp, Artificial Sequence
  NTC.27_NTC.22
  crRNA array
  misc_feature (148)..(157): n is a, c, g, or t
cttggctttatatatcttgtggaaaggacgaaacaccgtaatttctactaagtgtagatgtcgcgttgcgaccggcgcttaatttctactaagtgtagatgcgcgtcaacgtaatgtgcctaatttctactaagtgtagatttttttnnnnnnnnnnaagcttggcgtggatccgatatcaactagatcttgagacaaatggcagtattcatccacaattttaaaagaaaaggggggattggggggtacagtgcaggggaaagaatagtagacataatagcaacagacatacaaactaaag

SEQ ID NO: 21581 - DNA, 301 bp, Artificial Sequence
  NTC.27_NTC.17
  crRNA array
  misc_feature (148)..(157): n is a, c, g, or t
cttggctttatatatcttgtggaaaggacgaaacaccgtaatttctactaagtgtagatgtcgcgttgcgaccggcgcttaatttctactaagtgtagattatcgaacgctatcgaacgttaatttctactaagtgtagatttttttnnnnnnnnnnaagcttggcgtggatccgatatcaactagatcttgagacaaatggcagtattcatccacaattttaaaagaaaaggggggattggggggtacagtgcaggggaaagaatagtagacataatagcaacagacatacaaactaaag

SEQ ID NO: 21582 - DNA, 301 bp, Artificial Sequence
  NTC.27_NTC.9
  crRNA array
  misc_feature (148)..(157): n is a, c, g, or t
cttggctttatatatcttgtggaaaggacgaaacaccgtaatttctactaagtgtagatgtcgcgttgcgaccggcgcttaatttctactaagtgtagatatcgccgtacggctatggcataatttctactaagtgtagatttttttnnnnnnnnnnaagcttggcgtggatccgatatcaactagatcttgagacaaatggcagtattcatccacaattttaaaagaaaaggggggattggggggtacagtgcaggggaaagaatagtagacataatagcaacagacatacaaactaaag

SEQ ID NO: 21583 - DNA, 301 bp, Artificial Sequence
  NTC.27_NTC.30
  crRNA array
  misc_feature (148)..(157): n is a, c, g, or t
cttggctttatatatcttgtggaaaggacgaaacaccgtaatttctactaagtgtagatgtcgcgttgcgaccggcgcttaatttctactaagtgtagatcgatcgtacgggtgtcctaataatttctactaagtgtagatttttttnnnnnnnnnnaagcttggcgtggatccgatatcaactagatcttgagacaaatggcagtattcatccacaattttaaaagaaaaggggggattggggggtacagtgcaggggaaagaatagtagacataatagcaacagacatacaaactaaag

SEQ ID NO: 21584 - DNA, 301 bp, Artificial Sequence
  NTC.27_NTC.8
  crRNA array
  misc_feature (148)..(157): n is a, c, g, or t
cttggctttatatatcttgtggaaaggacgaaacaccgtaatttctactaagtgtagatgtcgcgttgcgaccggcgcttaatttctactaagtgtagatcgaccgaggttacgctgggataatttctactaagtgtagatttttttnnnnnnnnnnaagcttggcgtggatccgatatcaactagatcttgagacaaatggcagtattcatccacaattttaaaagaaaaggggggattggggggtacagtgcaggggaaagaatagtagacataatagcaacagacatacaaactaaag

SEQ ID NO: 21585 - DNA, 301 bp, Artificial Sequence
  NTC.27_NTC.46
  crRNA array
  misc_feature (148)..(157): n is a, c, g, or t
cttggctttatatatcttgtggaaaggacgaaacaccgtaatttctactaagtgtagatgtcgcgttgcgaccggcgcttaatttctactaagtgtagatagcgggtcgtagacgcgcggtaatttctactaagtgtagatttttttnnnnnnnnnnaagcttggcgtggatccgatatcaactagatcttgagacaaatggcagtattcatccacaattttaaaagaaaaggggggattggggggtacagtgcaggggaaagaatagtagacataatagcaacagacatacaaactaaag

SEQ ID NO: 21586 - DNA, 301 bp, Artificial Sequence
  NTC.27_NTC.35
  crRNA array
  misc_feature (148)..(157): n is a, c, g, or t
cttggctttatatatcttgtggaaaggacgaaacaccgtaatttctactaagtgtagatgtcgcgttgcgaccggcgcttaatttctactaagtgtagattggcgcgtaatcgctattcgtaatttctactaagtgtagatttttttnnnnnnnnnnaagcttggcgtggatccgatatcaactagatcttgagacaaatggcagtattcatccacaattttaaaagaaaaggggggattggggggtacagtgcaggggaaagaatagtagacataatagcaacagacatacaaactaaag

SEQ ID NO: 21587 - DNA, 301 bp, Artificial Sequence
  NTC.27_NTC.10
  crRNA array
  misc_feature (148)..(157): n is a, c, g, or t
cttggctttatatatcttgtggaaaggacgaaacaccgtaatttctactaagtgtagatgtcgcgttgcgaccggcgcttaatttctactaagtgtagatcgctaagttcgcgcgggccgtaatttctactaagtgtagatttttttnnnnnnnnnnaagcttggcgtggatccgatatcaactagatcttgagacaaatggcagtattcatccacaattttaaaagaaaaggggggattggggggtacagtgcaggggaaagaatagtagacataatagcaacagacatacaaactaaag

SEQ ID NO: 21588 - DNA, 301 bp, Artificial Sequence
  NTC.27_NTC.11
  crRNA array
  misc_feature (148)..(157): n is a, c, g, or t
cttggctttatatatcttgtggaaaggacgaaacaccgtaatttctactaagtgtagatgtcgcgttgcgaccggcgcttaatttctactaagtgtagatcgttcgtcgacgaagcaatctaatttctactaagtgtagatttttttnnnnnnnnnnaagcttggcgtggatccgatatcaactagatcttgagacaaatggcagtattcatccacaattttaaaagaaaaggggggattggggggtacagtgcaggggaaagaatagtagacataatagcaacagacatacaaactaaag

SEQ ID NO: 21589 - DNA, 301 bp, Artificial Sequence
  NTC.27_NTC.14
  crRNA array
  misc_feature (148)..(157): n is a, c, g, or t
cttggctttatatatcttgtggaaaggacgaaacaccgtaatttctactaagtgtagatgtcgcgttgcgaccggcgcttaatttctactaagtgtagatccgttcgtgcgatagtgttttaatttctactaagtgtagatttttttnnnnnnnnnnaagcttggcgtggatccgatatcaactagatcttgagacaaatggcagtattcatccacaattttaaaagaaaaggggggattggggggtacagtgcaggggaaagaatagtagacataatagcaacagacatacaaactaaag

SEQ ID NO: 21590 - DNA, 301 bp, Artificial Sequence
  NTC.27_NTC.28
  crRNA array
  misc_feature (148)..(157): n is a, c, g, or t
cttggctttatatatcttgtggaaaggacgaaacaccgtaatttctactaagtgtagatgtcgcgttgcgaccggcgcttaatttctactaagtgtagataccgctaatcggcgtaaacttaatttctactaagtgtagatttttttnnnnnnnnnnaagcttggcgtggatccgatatcaactagatcttgagacaaatggcagtattcatccacaattttaaaagaaaaggggggattggggggtacagtgcaggggaaagaatagtagacataatagcaacagacatacaaactaaag

SEQ ID NO: 21591 - DNA, 301 bp, Artificial Sequence
  NTC.34_NTC.16
  crRNA array
  misc_feature (148)..(157): n is a, c, g, or t
cttggctttatatatcttgtggaaaggacgaaacaccgtaatttctactaagtgtagattagcgttcgacacgtgaaactaatttctactaagtgtagatcggtacgttagacgaaaatttaatttctactaagtgtagatttttttnnnnnnnnnnaagcttggcgtggatccgatatcaactagatcttgagacaaatggcagtattcatccacaattttaaaagaaaaggggggattggggggtacagtgcaggggaaagaatagtagacataatagcaacagacatacaaactaaag

SEQ ID NO: 21592 - DNA, 301 bp, Artificial Sequence
  NTC.34_NTC.4
  crRNA array
  misc_feature (148)..(157): n is a, c, g, or t
cttggctttatatatcttgtggaaaggacgaaacaccgtaatttctactaagtgtagattagcgttcgacacgtgaaactaatttctactaagtgtagatatacccgtcgcgaacgtgagtaatttctactaagtgtagatttttttnnnnnnnnnnaagcttggcgtggatccgatatcaactagatcttgagacaaatggcagtattcatccacaattttaaaagaaaaggggggattggggggtacagtgcaggggaaagaatagtagacataatagcaacagacatacaaactaaag

SEQ ID NO: 21593 - DNA, 301 bp, Artificial Sequence
  NTC.34_NTC.42
  crRNA array
  misc_feature (148)..(157): n is a, c, g, or t
cttggctttatatatcttgtggaaaggacgaaacaccgtaatttctactaagtgtagattagcgttcgacacgtgaaactaatttctactaagtgtagatggtcaaatcgcggcgataactaatttctactaagtgtagatttttttnnnnnnnnnnaagcttggcgtggatccgatatcaactagatcttgagacaaatggcagtattcatccacaattttaaaagaaaaggggggattggggggtacagtgcaggggaaagaatagtagacataatagcaacagacatacaaactaaag

SEQ ID NO: 21594 - DNA, 301 bp, Artificial Sequence
  NTC.34_NTC.22
  crRNA array
  misc_feature (148)..(157): n is a, c, g, or t
cttggctttatatatcttgtggaaaggacgaaacaccgtaatttctactaagtgtagattagcgttcgacacgtgaaactaatttctactaagtgtagatgcgcgtcaacgtaatgtgcctaatttctactaagtgtagatttttttnnnnnnnnnnaagcttggcgtggatccgatatcaactagatcttgagacaaatggcagtattcatccacaattttaaaagaaaaggggggattggggggtacagtgcaggggaaagaatagtagacataatagcaacagacatacaaactaaag

SEQ ID NO: 21595 - DNA, 301 bp, Artificial Sequence
  NTC.34_NTC.17
  crRNA array
  misc_feature (148)..(157): n is a, c, g, or t
cttggctttatatatcttgtggaaaggacgaaacaccgtaatttctactaagtgtagattagcgttcgacacgtgaaactaatttctactaagtgtagattatcgaacgctatcgaacgttaatttctactaagtgtagatttttttnnnnnnnnnnaagcttggcgtggatccgatatcaactagatcttgagacaaatggcagtattcatccacaattttaaaagaaaaggggggattggggggtacagtgcaggggaaagaatagtagacataatagcaacagacatacaaactaaag

SEQ ID NO: 21596 - DNA, 301 bp, Artificial Sequence
  NTC.34_NTC.9
  crRNA array
  misc_feature (148)..(157): n is a, c, g, or t
cttggctttatatatcttgtggaaaggacgaaacaccgtaatttctactaagtgtagattagcgttcgacacgtgaaactaatttctactaagtgtagatatcgccgtacggctatggcataatttctactaagtgtagatttttttnnnnnnnnnnaagcttggcgtggatccgatatcaactagatcttgagacaaatggcagtattcatccacaattttaaaagaaaaggggggattggggggtacagtgcaggggaaagaatagtagacataatagcaacagacatacaaactaaag

SEQ ID NO: 21597 - DNA, 301 bp, Artificial Sequence
  NTC.34_NTC.30
  crRNA array
  misc_feature (148)..(157): n is a, c, g, or t
cttggctttatatatcttgtggaaaggacgaaacaccgtaatttctactaagtgtagattagcgttcgacacgtgaaactaatttctactaagtgtagatcgatcgtacgggtgtcctaataatttctactaagtgtagatttttttnnnnnnnnnnaagcttggcgtggatccgatatcaactagatcttgagacaaatggcagtattcatccacaattttaaaagaaaaggggggattggggggtacagtgcaggggaaagaatagtagacataatagcaacagacatacaaactaaag

SEQ ID NO: 21598 - DNA, 301 bp, Artificial Sequence
  NTC.34_NTC.8
  crRNA array
  misc_feature (148)..(157): n is a, c, g, or t
cttggctttatatatcttgtggaaaggacgaaacaccgtaatttctactaagtgtagattagcgttcgacacgtgaaactaatttctactaagtgtagatcgaccgaggttacgctgggataatttctactaagtgtagatttttttnnnnnnnnnnaagcttggcgtggatccgatatcaactagatcttgagacaaatggcagtattcatccacaattttaaaagaaaaggggggattggggggtacagtgcaggggaaagaatagtagacataatagcaacagacatacaaactaaag

SEQ ID NO: 21599 - DNA, 301 bp, Artificial Sequence
  NTC.34_NTC.46
  crRNA array
  misc_feature (148)..(157): n is a, c, g, or t
cttggctttatatatcttgtggaaaggacgaaacaccgtaatttctactaagtgtagattagcgttcgacacgtgaaactaatttctactaagtgtagatagcgggtcgtagacgcgcggtaatttctactaagtgtagatttttttnnnnnnnnnnaagcttggcgtggatccgatatcaactagatcttgagacaaatggcagtattcatccacaattttaaaagaaaaggggggattggggggtacagtgcaggggaaagaatagtagacataatagcaacagacatacaaactaaag

SEQ ID NO: 21600 - DNA, 301 bp, Artificial Sequence
  NTC.34_NTC.35
  crRNA array
  misc_feature (148)..(157): n is a, c, g, or t
cttggctttatatatcttgtggaaaggacgaaacaccgtaatttctactaagtgtagattagcgttcgacacgtgaaactaatttctactaagtgtagattggcgcgtaatcgctattcgtaatttctactaagtgtagatttttttnnnnnnnnnnaagcttggcgtggatccgatatcaactagatcttgagacaaatggcagtattcatccacaattttaaaagaaaaggggggattggggggtacagtgcaggggaaagaatagtagacataatagcaacagacatacaaactaaag

SEQ ID NO: 21601 - DNA, 301 bp, Artificial Sequence
  NTC.34_NTC.10
  crRNA array
  misc_feature (148)..(157): n is a, c, g, or t
cttggctttatatatcttgtggaaaggacgaaacaccgtaatttctactaagtgtagattagcgttcgacacgtgaaactaatttctactaagtgtagatcgctaagttcgcgcgggccgtaatttctactaagtgtagatttttttnnnnnnnnnnaagcttggcgtggatccgatatcaactagatcttgagacaaatggcagtattcatccacaattttaaaagaaaaggggggattggggggtacagtgcaggggaaagaatagtagacataatagcaacagacatacaaactaaag

SEQ ID NO: 21602 - DNA, 301 bp, Artificial Sequence
  NTC.34_NTC.11
  crRNA array
  misc_feature (148)..(157): n is a, c, g, or t
cttggctttatatatcttgtggaaaggacgaaacaccgtaatttctactaagtgtagattagcgttcgacacgtgaaactaatttctactaagtgtagatcgttcgtcgacgaagcaatctaatttctactaagtgtagatttttttnnnnnnnnnnaagcttggcgtggatccgatatcaactagatcttgagacaaatggcagtattcatccacaattttaaaagaaaaggggggattggggggtacagtgcaggggaaagaatagtagacataatagcaacagacatacaaactaaag

SEQ ID NO: 21603 - DNA, 301 bp, Artificial Sequence
  NTC.34_NTC.14
  crRNA array
  misc_feature (148)..(157): n is a, c, g, or t
cttggctttatatatcttgtggaaaggacgaaacaccgtaatttctactaagtgtagattagcgttcgacacgtgaaactaatttctactaagtgtagatccgttcgtgcgatagtgttttaatttctactaagtgtagatttttttnnnnnnnnnnaagcttggcgtggatccgatatcaactagatcttgagacaaatggcagtattcatccacaattttaaaagaaaaggggggattggggggtacagtgcaggggaaagaatagtagacataatagcaacagacatacaaactaaag

SEQ ID NO: 21604 - DNA, 301 bp, Artificial Sequence
  NTC.34_NTC.28
  crRNA array
  misc_feature (148)..(157): n is a, c, g, or t
cttggctttatatatcttgtggaaaggacgaaacaccgtaatttctactaagtgtagattagcgttcgacacgtgaaactaatttctactaagtgtagataccgctaatcggcgtaaacttaatttctactaagtgtagatttttttnnnnnnnnnnaagcttggcgtggatccgatatcaactagatcttgagacaaatggcagtattcatccacaattttaaaagaaaaggggggattggggggtacagtgcaggggaaagaatagtagacataatagcaacagacatacaaactaaag

SEQ ID NO: 21605 - DNA, 301 bp, Artificial Sequence
  NTC.16_NTC.4
  crRNA array
  misc_feature (148)..(157): n is a, c, g, or t
cttggctttatatatcttgtggaaaggacgaaacaccgtaatttctactaagtgtagatcggtacgttagacgaaaatttaatttctactaagtgtagatatacccgtcgcgaacgtgagtaatttctactaagtgtagatttttttnnnnnnnnnnaagcttggcgtggatccgatatcaactagatcttgagacaaatggcagtattcatccacaattttaaaagaaaaggggggattggggggtacagtgcaggggaaagaatagtagacataatagcaacagacatacaaactaaag

SEQ ID NO: 21606 - DNA, 301 bp, Artificial Sequence
  NTC.16_NTC.42
  crRNA array
  misc_feature (148)..(157): n is a, c, g, or t
cttggctttatatatcttgtggaaaggacgaaacaccgtaatttctactaagtgtagatcggtacgttagacgaaaatttaatttctactaagtgtagatggtcaaatcgcggcgataactaatttctactaagtgtagatttttttnnnnnnnnnnaagcttggcgtggatccgatatcaactagatcttgagacaaatggcagtattcatccacaattttaaaagaaaaggggggattggggggtacagtgcaggggaaagaatagtagacataatagcaacagacatacaaactaaag

SEQ ID NO: 21607 - DNA, 301 bp, Artificial Sequence
  NTC.16_NTC.22
  crRNA array
  misc_feature (148)..(157): n is a, c, g, or t
cttggctttatatatcttgtggaaaggacgaaacaccgtaatttctactaagtgtagatcggtacgttagacgaaaatttaatttctactaagtgtagatgcgcgtcaacgtaatgtgcctaatttctactaagtgtagatttttttnnnnnnnnnnaagcttggcgtggatccgatatcaactagatcttgagacaaatggcagtattcatccacaattttaaaagaaaaggggggattggggggtacagtgcaggggaaagaatagtagacataatagcaacagacatacaaactaaag

SEQ ID NO: 21608 - DNA, 301 bp, Artificial Sequence
  NTC.16_NTC.17
  crRNA array
  misc_feature (148)..(157): n is a, c, g, or t
cttggctttatatatcttgtggaaaggacgaaacaccgtaatttctactaagtgtagatcggtacgttagacgaaaatttaatttctactaagtgtagattatcgaacgctatcgaacgttaatttctactaagtgtagatttttttnnnnnnnnnnaagcttggcgtggatccgatatcaactagatcttgagacaaatggcagtattcatccacaattttaaaagaaaaggggggattggggggtacagtgcaggggaaagaatagtagacataatagcaacagacatacaaactaaag

SEQ ID NO: 21609 - DNA, 301 bp, Artificial Sequence
  NTC.16_NTC.9
  crRNA array
  misc_feature (148)..(157): n is a, c, g, or t
cttggctttatatatcttgtggaaaggacgaaacaccgtaatttctactaagtgtagatcggtacgttagacgaaaatttaatttctactaagtgtagatatcgccgtacggctatggcataatttctactaagtgtagatttttttnnnnnnnnnnaagcttggcgtggatccgatatcaactagatcttgagacaaatggcagtattcatccacaattttaaaagaaaaggggggattggggggtacagtgcaggggaaagaatagtagacataatagcaacagacatacaaactaaag

SEQ ID NO: 21610 - DNA, 301 bp, Artificial Sequence
  NTC.16_NTC.30
  crRNA array
  misc_feature (148)..(157): n is a, c, g, or t
cttggctttatatatcttgtggaaaggacgaaacaccgtaatttctactaagtgtagatcggtacgttagacgaaaatttaatttctactaagtgtagatcgatcgtacgggtgtcctaataatttctactaagtgtagatttttttnnnnnnnnnnaagcttggcgtggatccgatatcaactagatcttgagacaaatggcagtattcatccacaattttaaaagaaaaggggggattggggggtacagtgcaggggaaagaatagtagacataatagcaacagacatacaaactaaag

SEQ ID NO: 21611 - DNA, 301 bp, Artificial Sequence
  NTC.16_NTC.8
  crRNA array
  misc_feature (148)..(157): n is a, c, g, or t
cttggctttatatatcttgtggaaaggacgaaacaccgtaatttctactaagtgtagatcggtacgttagacgaaaatttaatttctactaagtgtagatcgaccgaggttacgctgggataatttctactaagtgtagatttttttnnnnnnnnnnaagcttggcgtggatccgatatcaactagatcttgagacaaatggcagtattcatccacaattttaaaagaaaaggggggattggggggtacagtgcaggggaaagaatagtagacataatagcaacagacatacaaactaaag

SEQ ID NO: 21612 - DNA, 301 bp, Artificial Sequence
  NTC.16_NTC.46
  crRNA array
  misc_feature (148)..(157): n is a, c, g, or t
cttggctttatatatcttgtggaaaggacgaaacaccgtaatttctactaagtgtagatcggtacgttagacgaaaatttaatttctactaagtgtagatagcgggtcgtagacgcgcggtaatttctactaagtgtagatttttttnnnnnnnnnnaagcttggcgtggatccgatatcaactagatcttgagacaaatggcagtattcatccacaattttaaaagaaaaggggggattggggggtacagtgcaggggaaagaatagtagacataatagcaacagacatacaaactaaag

SEQ ID NO: 21613 - DNA, 301 bp, Artificial Sequence
  NTC.16_NTC.35
  crRNA array
  misc_feature (148)..(157): n is a, c, g, or t
cttggctttatatatcttgtggaaaggacgaaacaccgtaatttctactaagtgtagatcggtacgttagacgaaaatttaatttctactaagtgtagattggcgcgtaatcgctattcgtaatttctactaagtgtagatttttttnnnnnnnnnnaagcttggcgtggatccgatatcaactagatcttgagacaaatggcagtattcatccacaattttaaaagaaaaggggggattggggggtacagtgcaggggaaagaatagtagacataatagcaacagacatacaaactaaag

SEQ ID NO: 21614 - DNA, 301 bp, Artificial Sequence
  NTC.16_NTC.10
  crRNA array
  misc_feature (148)..(157): n is a, c, g, or t
cttggctttatatatcttgtggaaaggacgaaacaccgtaatttctactaagtgtagatcggtacgttagacgaaaatttaatttctactaagtgtagatcgctaagttcgcgcgggccgtaatttctactaagtgtagatttttttnnnnnnnnnnaagcttggcgtggatccgatatcaactagatcttgagacaaatggcagtattcatccacaattttaaaagaaaaggggggattggggggtacagtgcaggggaaagaatagtagacataatagcaacagacatacaaactaaag

SEQ ID NO: 21615 - DNA, 301 bp, Artificial Sequence
  NTC.16_NTC.11
  crRNA array
  misc_feature (148)..(157): n is a, c, g, or t
cttggctttatatatcttgtggaaaggacgaaacaccgtaatttctactaagtgtagatcggtacgttagacgaaaatttaatttctactaagtgtagatcgttcgtcgacgaagcaatctaatttctactaagtgtagatttttttnnnnnnnnnnaagcttggcgtggatccgatatcaactagatcttgagacaaatggcagtattcatccacaattttaaaagaaaaggggggattggggggtacagtgcaggggaaagaatagtagacataatagcaacagacatacaaactaaag

SEQ ID NO: 21616 - DNA, 301 bp, Artificial Sequence
  NTC.16_NTC.14
  crRNA array
  misc_feature (148)..(157): n is a, c, g, or t
cttggctttatatatcttgtggaaaggacgaaacaccgtaatttctactaagtgtagatcggtacgttagacgaaaatttaatttctactaagtgtagatccgttcgtgcgatagtgttttaatttctactaagtgtagatttttttnnnnnnnnnnaagcttggcgtggatccgatatcaactagatcttgagacaaatggcagtattcatccacaattttaaaagaaaaggggggattggggggtacagtgcaggggaaagaatagtagacataatagcaacagacatacaaactaaag

SEQ ID NO: 21617 - DNA, 301 bp, Artificial Sequence
  NTC.16_NTC.28
  crRNA array
  misc_feature (148)..(157): n is a, c, g, or t
cttggctttatatatcttgtggaaaggacgaaacaccgtaatttctactaagtgtagatcggtacgttagacgaaaatttaatttctactaagtgtagataccgctaatcggcgtaaacttaatttctactaagtgtagatttttttnnnnnnnnnnaagcttggcgtggatccgatatcaactagatcttgagacaaatggcagtattcatccacaattttaaaagaaaaggggggattggggggtacagtgcaggggaaagaatagtagacataatagcaacagacatacaaactaaag

SEQ ID NO: 21618 - DNA, 301 bp, Artificial Sequence
  NTC.4_NTC.42
  crRNA array
  misc_feature (148)..(157): n is a, c, g, or t
cttggctttatatatcttgtggaaaggacgaaacaccgtaatttctactaagtgtagatatacccgtcgcgaacgtgagtaatttctactaagtgtagatggtcaaatcgcggcgataactaatttctactaagtgtagatttttttnnnnnnnnnnaagcttggcgtggatccgatatcaactagatcttgagacaaatggcagtattcatccacaattttaaaagaaaaggggggattggggggtacagtgcaggggaaagaatagtagacataatagcaacagacatacaaactaaag

SEQ ID NO: 21619 - DNA, 301 bp, Artificial Sequence
  NTC.4_NTC.22
  crRNA array
  misc_feature (148)..(157): n is a, c, g, or t
cttggctttatatatcttgtggaaaggacgaaacaccgtaatttctactaagtgtagatatacccgtcgcgaacgtgagtaatttctactaagtgtagatgcgcgtcaacgtaatgtgcctaatttctactaagtgtagatttttttnnnnnnnnnnaagcttggcgtggatccgatatcaactagatcttgagacaaatggcagtattcatccacaattttaaaagaaaaggggggattggggggtacagtgcaggggaaagaatagtagacataatagcaacagacatacaaactaaag

SEQ ID NO: 21620 - DNA, 301 bp, Artificial Sequence
  NTC.4_NTC.17
  crRNA array
  misc_feature (148)..(157): n is a, c, g, or t
cttggctttatatatcttgtggaaaggacgaaacaccgtaatttctactaagtgtagatatacccgtcgcgaacgtgagtaatttctactaagtgtagattatcgaacgctatcgaacgttaatttctactaagtgtagatttttttnnnnnnnnnnaagcttggcgtggatccgatatcaactagatcttgagacaaatggcagtattcatccacaattttaaaagaaaaggggggattggggggtacagtgcaggggaaagaatagtagacataatagcaacagacatacaaactaaag

SEQ ID NO: 21621 - DNA, 301 bp, Artificial Sequence
  NTC.4_NTC.9
  crRNA array
  misc_feature (148)..(157): n is a, c, g, or t
cttggctttatatatcttgtggaaaggacgaaacaccgtaatttctactaagtgtagatatacccgtcgcgaacgtgagtaatttctactaagtgtagatatcgccgtacggctatggcataatttctactaagtgtagatttttttnnnnnnnnnnaagcttggcgtggatccgatatcaactagatcttgagacaaatggcagtattcatccacaattttaaaagaaaaggggggattggggggtacagtgcaggggaaagaatagtagacataatagcaacagacatacaaactaaag

SEQ ID NO: 21622 - DNA, 301 bp, Artificial Sequence
  NTC.4_NTC.30
  crRNA array
  misc_feature (148)..(157): n is a, c, g, or t
cttggctttatatatcttgtggaaaggacgaaacaccgtaatttctactaagtgtagatatacccgtcgcgaacgtgagtaatttctactaagtgtagatcgatcgtacgggtgtcctaataatttctactaagtgtagatttttttnnnnnnnnnnaagcttggcgtggatccgatatcaactagatcttgagacaaatggcagtattcatccacaattttaaaagaaaaggggggattggggggtacagtgcaggggaaagaatagtagacataatagcaacagacatacaaactaaag

SEQ ID NO: 21623 - DNA, 301 bp, Artificial Sequence
  NTC.4_NTC.8
  crRNA array
  misc_feature (148)..(157): n is a, c, g, or t
cttggctttatatatcttgtggaaaggacgaaacaccgtaatttctactaagtgtagatatacccgtcgcgaacgtgagtaatttctactaagtgtagatcgaccgaggttacgctgggataatttctactaagtgtagatttttttnnnnnnnnnnaagcttggcgtggatccgatatcaactagatcttgagacaaatggcagtattcatccacaattttaaaagaaaaggggggattggggggtacagtgcaggggaaagaatagtagacataatagcaacagacatacaaactaaag

SEQ ID NO: 21624 - DNA, 301 bp, Artificial Sequence
  NTC.4_NTC.46
  crRNA array
  misc_feature (148)..(157): n is a, c, g, or t
cttggctttatatatcttgtggaaaggacgaaacaccgtaatttctactaagtgtagatatacccgtcgcgaacgtgagtaatttctactaagtgtagatagcgggtcgtagacgcgcggtaatttctactaagtgtagatttttttnnnnnnnnnnaagcttggcgtggatccgatatcaactagatcttgagacaaatggcagtattcatccacaattttaaaagaaaaggggggattggggggtacagtgcaggggaaagaatagtagacataatagcaacagacatacaaactaaag

SEQ ID NO: 21625 - DNA, 301 bp, Artificial Sequence
  NTC.4_NTC.35
  crRNA array
  misc_feature (148)..(157): n is a, c, g, or t
cttggctttatatatcttgtggaaaggacgaaacaccgtaatttctactaagtgtagatatacccgtcgcgaacgtgagtaatttctactaagtgtagattggcgcgtaatcgctattcgtaatttctactaagtgtagatttttttnnnnnnnnnnaagcttggcgtggatccgatatcaactagatcttgagacaaatggcagtattcatccacaattttaaaagaaaaggggggattggggggtacagtgcaggggaaagaatagtagacataatagcaacagacatacaaactaaag

SEQ ID NO: 21626 - DNA, 301 bp, Artificial Sequence
  NTC.4_NTC.10
  crRNA array
  misc_feature (148)..(157): n is a, c, g, or t
cttggctttatatatcttgtggaaaggacgaaacaccgtaatttctactaagtgtagatatacccgtcgcgaacgtgagtaatttctactaagtgtagatcgctaagttcgcgcgggccgtaatttctactaagtgtagatttttttnnnnnnnnnnaagcttggcgtggatccgatatcaactagatcttgagacaaatggcagtattcatccacaattttaaaagaaaaggggggattggggggtacagtgcaggggaaagaatagtagacataatagcaacagacatacaaactaaag

SEQ ID NO: 21627 - DNA, 301 bp, Artificial Sequence
  NTC.4_NTC.11
  crRNA array
  misc_feature (148)..(157): n is a, c, g, or t
cttggctttatatatcttgtggaaaggacgaaacaccgtaatttctactaagtgtagatatacccgtcgcgaacgtgagtaatttctactaagtgtagatcgttcgtcgacgaagcaatctaatttctactaagtgtagatttttttnnnnnnnnnnaagcttggcgtggatccgatatcaactagatcttgagacaaatggcagtattcatccacaattttaaaagaaaaggggggattggggggtacagtgcaggggaaagaatagtagacataatagcaacagacatacaaactaaag

SEQ ID NO: 21628 - DNA, 301 bp, Artificial Sequence
  NTC.4_NTC.14
  crRNA array
  misc_feature (148)..(157): n is a, c, g, or t
cttggctttatatatcttgtggaaaggacgaaacaccgtaatttctactaagtgtagatatacccgtcgcgaacgtgagtaatttctactaagtgtagatccgttcgtgcgatagtgttttaatttctactaagtgtagatttttttnnnnnnnnnnaagcttggcgtggatccgatatcaactagatcttgagacaaatggcagtattcatccacaattttaaaagaaaaggggggattggggggtacagtgcaggggaaagaatagtagacataatagcaacagacatacaaactaaag

SEQ ID NO: 21629 - DNA, 301 bp, Artificial Sequence
  NTC.4_NTC.28
  crRNA array
  misc_feature (148)..(157): n is a, c, g, or t
cttggctttatatatcttgtggaaaggacgaaacaccgtaatttctactaagtgtagatatacccgtcgcgaacgtgagtaatttctactaagtgtagataccgctaatcggcgtaaacttaatttctactaagtgtagatttttttnnnnnnnnnnaagcttggcgtggatccgatatcaactagatcttgagacaaatggcagtattcatccacaattttaaaagaaaaggggggattggggggtacagtgcaggggaaagaatagtagacataatagcaacagacatacaaactaaag

SEQ ID NO: 21630 - DNA, 301 bp, Artificial Sequence
  NTC.42_NTC.22
  crRNA array
  misc_feature (148)..(157): n is a, c, g, or t
cttggctttatatatcttgtggaaaggacgaaacaccgtaatttctactaagtgtagatggtcaaatcgcggcgataactaatttctactaagtgtagatgcgcgtcaacgtaatgtgcctaatttctactaagtgtagatttttttnnnnnnnnnnaagcttggcgtggatccgatatcaactagatcttgagacaaatggcagtattcatccacaattttaaaagaaaaggggggattggggggtacagtgcaggggaaagaatagtagacataatagcaacagacatacaaactaaag

SEQ ID NO: 21631 - DNA, 301 bp, Artificial Sequence
  NTC.42_NTC.17
  crRNA array
  misc_feature (148)..(157): n is a, c, g, or t
cttggctttatatatcttgtggaaaggacgaaacaccgtaatttctactaagtgtagatggtcaaatcgcggcgataactaatttctactaagtgtagattatcgaacgctatcgaacgttaatttctactaagtgtagatttttttnnnnnnnnnnaagcttggcgtggatccgatatcaactagatcttgagacaaatggcagtattcatccacaattttaaaagaaaaggggggattggggggtacagtgcaggggaaagaatagtagacataatagcaacagacatacaaactaaag

SEQ ID NO: 21632 - DNA, 301 bp, Artificial Sequence
  NTC.42_NTC.9
  crRNA array
  misc_feature (148)..(157): n is a, c, g, or t
cttggctttatatatcttgtggaaaggacgaaacaccgtaatttctactaagtgtagatggtcaaatcgcggcgataactaatttctactaagtgtagatatcgccgtacggctatggcataatttctactaagtgtagatttttttnnnnnnnnnnaagcttggcgtggatccgatatcaactagatcttgagacaaatggcagtattcatccacaattttaaaagaaaaggggggattggggggtacagtgcaggggaaagaatagtagacataatagcaacagacatacaaactaaag

SEQ ID NO: 21633 - DNA, 301 bp, Artificial Sequence
  NTC.42_NTC.30
  crRNA array
  misc_feature (148)..(157): n is a, c, g, or t
cttggctttatatatcttgtggaaaggacgaaacaccgtaatttctactaagtgtagatggtcaaatcgcggcgataactaatttctactaagtgtagatcgatcgtacgggtgtcctaataatttctactaagtgtagatttttttnnnnnnnnnnaagcttggcgtggatccgatatcaactagatcttgagacaaatggcagtattcatccacaattttaaaagaaaaggggggattggggggtacagtgcaggggaaagaatagtagacataatagcaacagacatacaaactaaag

SEQ ID NO: 21634 - DNA, 301 bp, Artificial Sequence
  NTC.42_NTC.8
  crRNA array
  misc_feature (148)..(157): n is a, c, g, or t
cttggctttatatatcttgtggaaaggacgaaacaccgtaatttctactaagtgtagatggtcaaatcgcggcgataactaatttctactaagtgtagatcgaccgaggttacgctgggataatttctactaagtgtagatttttttnnnnnnnnnnaagcttggcgtggatccgatatcaactagatcttgagacaaatggcagtattcatccacaattttaaaagaaaaggggggattggggggtacagtgcaggggaaagaatagtagacataatagcaacagacatacaaactaaag

SEQ ID NO: 21635 - DNA, 301 bp, Artificial Sequence
  NTC.42_NTC.46
  crRNA array
  misc_feature (148)..(157): n is a, c, g, or t
cttggctttatatatcttgtggaaaggacgaaacaccgtaatttctactaagtgtagatggtcaaatcgcggcgataactaatttctactaagtgtagatagcgggtcgtagacgcgcggtaatttctactaagtgtagatttttttnnnnnnnnnnaagcttggcgtggatccgatatcaactagatcttgagacaaatggcagtattcatccacaattttaaaagaaaaggggggattggggggtacagtgcaggggaaagaatagtagacataatagcaacagacatacaaactaaag

SEQ ID NO: 21636 - DNA, 301 bp, Artificial Sequence
  NTC.42_NTC.35
  crRNA array
  misc_feature (148)..(157): n is a, c, g, or t
cttggctttatatatcttgtggaaaggacgaaacaccgtaatttctactaagtgtagatggtcaaatcgcggcgataactaatttctactaagtgtagattggcgcgtaatcgctattcgtaatttctactaagtgtagatttttttnnnnnnnnnnaagcttggcgtggatccgatatcaactagatcttgagacaaatggcagtattcatccacaattttaaaagaaaaggggggattggggggtacagtgcaggggaaagaatagtagacataatagcaacagacatacaaactaaag

SEQ ID NO: 21637 - DNA, 301 bp, Artificial Sequence
  NTC.42_NTC.10
  crRNA array
  misc_feature (148)..(157): n is a, c, g, or t
cttggctttatatatcttgtggaaaggacgaaacaccgtaatttctactaagtgtagatggtcaaatcgcggcgataactaatttctactaagtgtagatcgctaagttcgcgcgggccgtaatttctactaagtgtagatttttttnnnnnnnnnnaagcttggcgtggatccgatatcaactagatcttgagacaaatggcagtattcatccacaattttaaaagaaaaggggggattggggggtacagtgcaggggaaagaatagtagacataatagcaacagacatacaaactaaag

SEQ ID NO: 21638 - DNA, 301 bp, Artificial Sequence
  NTC.42_NTC.11
  crRNA array
  misc_feature (148)..(157): n is a, c, g, or t
cttggctttatatatcttgtggaaaggacgaaacaccgtaatttctactaagtgtagatggtcaaatcgcggcgataactaatttctactaagtgtagatcgttcgtcgacgaagcaatctaatttctactaagtgtagatttttttnnnnnnnnnnaagcttggcgtggatccgatatcaactagatcttgagacaaatggcagtattcatccacaattttaaaagaaaaggggggattggggggtacagtgcaggggaaagaatagtagacataatagcaacagacatacaaactaaag

SEQ ID NO: 21639 - DNA, 301 bp, Artificial Sequence
  NTC.42_NTC.14
  crRNA array
  misc_feature (148)..(157): n is a, c, g, or t
cttggctttatatatcttgtggaaaggacgaaacaccgtaatttctactaagtgtagatggtcaaatcgcggcgataactaatttctactaagtgtagatccgttcgtgcgatagtgttttaatttctactaagtgtagatttttttnnnnnnnnnnaagcttggcgtggatccgatatcaactagatcttgagacaaatggcagtattcatccacaattttaaaagaaaaggggggattggggggtacagtgcaggggaaagaatagtagacataatagcaacagacatacaaactaaag

SEQ ID NO: 21640 - DNA, 301 bp, Artificial Sequence
  NTC.42_NTC.28
  crRNA array
  misc_feature (148)..(157): n is a, c, g, or t
cttggctttatatatcttgtggaaaggacgaaacaccgtaatttctactaagtgtagatggtcaaatcgcggcgataactaatttctactaagtgtagataccgctaatcggcgtaaacttaatttctactaagtgtagatttttttnnnnnnnnnnaagcttggcgtggatccgatatcaactagatcttgagacaaatggcagtattcatccacaattttaaaagaaaaggggggattggggggtacagtgcaggggaaagaatagtagacataatagcaacagacatacaaactaaag

SEQ ID NO: 21641 - DNA, 301 bp, Artificial Sequence
  NTC.22_NTC.17
  crRNA array
  misc_feature (148)..(157): n is a, c, g, or t
cttggctttatatatcttgtggaaaggacgaaacaccgtaatttctactaagtgtagatgcgcgtcaacgtaatgtgcctaatttctactaagtgtagattatcgaacgctatcgaacgttaatttctactaagtgtagatttttttnnnnnnnnnnaagcttggcgtggatccgatatcaactagatcttgagacaaatggcagtattcatccacaattttaaaagaaaaggggggattggggggtacagtgcaggggaaagaatagtagacataatagcaacagacatacaaactaaag

SEQ ID NO: 21642 - DNA, 301 bp, Artificial Sequence
  NTC.22_NTC.9
  crRNA array
  misc_feature (148)..(157): n is a, c, g, or t
cttggctttatatatcttgtggaaaggacgaaacaccgtaatttctactaagtgtagatgcgcgtcaacgtaatgtgcctaatttctactaagtgtagatatcgccgtacggctatggcataatttctactaagtgtagatttttttnnnnnnnnnnaagcttggcgtggatccgatatcaactagatcttgagacaaatggcagtattcatccacaattttaaaagaaaaggggggattggggggtacagtgcaggggaaagaatagtagacataatagcaacagacatacaaactaaag

SEQ ID NO: 21643 - DNA, 301 bp, Artificial Sequence
  NTC.22_NTC.30
  crRNA array
  misc_feature (148)..(157): n is a, c, g, or t
cttggctttatatatcttgtggaaaggacgaaacaccgtaatttctactaagtgtagatgcgcgtcaacgtaatgtgcctaatttctactaagtgtagatcgatcgtacgggtgtcctaataatttctactaagtgtagatttttttnnnnnnnnnnaagcttggcgtggatccgatatcaactagatcttgagacaaatggcagtattcatccacaattttaaaagaaaaggggggattggggggtacagtgcaggggaaagaatagtagacataatagcaacagacatacaaactaaag

SEQ ID NO: 21644 - DNA, 301 bp, Artificial Sequence
  NTC.22_NTC.8
  crRNA array
  misc_feature (148)..(157): n is a, c, g, or t
cttggctttatatatcttgtggaaaggacgaaacaccgtaatttctactaagtgtagatgcgcgtcaacgtaatgtgcctaatttctactaagtgtagatcgaccgaggttacgctgggataatttctactaagtgtagatttttttnnnnnnnnnnaagcttggcgtggatccgatatcaactagatcttgagacaaatggcagtattcatccacaattttaaaagaaaaggggggattggggggtacagtgcaggggaaagaatagtagacataatagcaacagacatacaaactaaag

SEQ ID NO: 21645 - DNA, 301 bp, Artificial Sequence
  NTC.22_NTC.46
  crRNA array
  misc_feature (148)..(157): n is a, c, g, or t
cttggctttatatatcttgtggaaaggacgaaacaccgtaatttctactaagtgtagatgcgcgtcaacgtaatgtgcctaatttctactaagtgtagatagcgggtcgtagacgcgcggtaatttctactaagtgtagatttttttnnnnnnnnnnaagcttggcgtggatccgatatcaactagatcttgagacaaatggcagtattcatccacaattttaaaagaaaaggggggattggggggtacagtgcaggggaaagaatagtagacataatagcaacagacatacaaactaaag

SEQ ID NO: 21646 - DNA, 301 bp, Artificial Sequence
  NTC.22_NTC.35
  crRNA array
  misc_feature (148)..(157): n is a, c, g, or t
cttggctttatatatcttgtggaaaggacgaaacaccgtaatttctactaagtgtagatgcgcgtcaacgtaatgtgcctaatttctactaagtgtagattggcgcgtaatcgctattcgtaatttctactaagtgtagatttttttnnnnnnnnnnaagcttggcgtggatccgatatcaactagatcttgagacaaatggcagtattcatccacaattttaaaagaaaaggggggattggggggtacagtgcaggggaaagaatagtagacataatagcaacagacatacaaactaaag

SEQ ID NO: 21647 - DNA, 301 bp, Artificial Sequence
  NTC.22_NTC.10
  crRNA array
  misc_feature (148)..(157): n is a, c, g, or t
cttggctttatatatcttgtggaaaggacgaaacaccgtaatttctactaagtgtagatgcgcgtcaacgtaatgtgcctaatttctactaagtgtagatcgctaagttcgcgcgggccgtaatttctactaagtgtagatttttttnnnnnnnnnnaagcttggcgtggatccgatatcaactagatcttgagacaaatggcagtattcatccacaattttaaaagaaaaggggggattggggggtacagtgcaggggaaagaatagtagacataatagcaacagacatacaaactaaag

SEQ ID NO: 21648 - DNA, 301 bp, Artificial Sequence
  NTC.22_NTC.11
  crRNA array
  misc_feature (148)..(157): n is a, c, g, or t
cttggctttatatatcttgtggaaaggacgaaacaccgtaatttctactaagtgtagatgcgcgtcaacgtaatgtgcctaatttctactaagtgtagatcgttcgtcgacgaagcaatctaatttctactaagtgtagatttttttnnnnnnnnnnaagcttggcgtggatccgatatcaactagatcttgagacaaatggcagtattcatccacaattttaaaagaaaaggggggattggggggtacagtgcaggggaaagaatagtagacataatagcaacagacatacaaactaaag

SEQ ID NO: 21649 - DNA, 301 bp, Artificial Sequence
  NTC.22_NTC.14
  crRNA array
  misc_feature (148)..(157): n is a, c, g, or t
cttggctttatatatcttgtggaaaggacgaaacaccgtaatttctactaagtgtagatgcgcgtcaacgtaatgtgcctaatttctactaagtgtagatccgttcgtgcgatagtgttttaatttctactaagtgtagatttttttnnnnnnnnnnaagcttggcgtggatccgatatcaactagatcttgagacaaatggcagtattcatccacaattttaaaagaaaaggggggattggggggtacagtgcaggggaaagaatagtagacataatagcaacagacatacaaactaaag

SEQ ID NO: 21650 - DNA, 301 bp, Artificial Sequence
  NTC.22_NTC.28
  crRNA array
  misc_feature (148)..(157): n is a, c, g, or t
cttggctttatatatcttgtggaaaggacgaaacaccgtaatttctactaagtgtagatgcgcgtcaacgtaatgtgcctaatttctactaagtgtagataccgctaatcggcgtaaacttaatttctactaagtgtagatttttttnnnnnnnnnnaagcttggcgtggatccgatatcaactagatcttgagacaaatggcagtattcatccacaattttaaaagaaaaggggggattggggggtacagtgcaggggaaagaatagtagacataatagcaacagacatacaaactaaag

SEQ ID NO: 21651 - DNA, 301 bp, Artificial Sequence
  NTC.17_NTC.9
  crRNA array
  misc_feature (148)..(157): n is a, c, g, or t
cttggctttatatatcttgtggaaaggacgaaacaccgtaatttctactaagtgtagattatcgaacgctatcgaacgttaatttctactaagtgtagatatcgccgtacggctatggcataatttctactaagtgtagatttttttnnnnnnnnnnaagcttggcgtggatccgatatcaactagatcttgagacaaatggcagtattcatccacaattttaaaagaaaaggggggattggggggtacagtgcaggggaaagaatagtagacataatagcaacagacatacaaactaaag

SEQ ID NO: 21652 - DNA, 301 bp, Artificial Sequence
  NTC.17_NTC.30
  crRNA array
  misc_feature (148)..(157): n is a, c, g, or t
cttggctttatatatcttgtggaaaggacgaaacaccgtaatttctactaagtgtagattatcgaacgctatcgaacgttaatttctactaagtgtagatcgatcgtacgggtgtcctaataatttctactaagtgtagatttttttnnnnnnnnnnaagcttggcgtggatccgatatcaactagatcttgagacaaatggcagtattcatccacaattttaaaagaaaaggggggattggggggtacagtgcaggggaaagaatagtagacataatagcaacagacatacaaactaaag

SEQ ID NO: 21653 - DNA, 301 bp, Artificial Sequence
  NTC.17_NTC.8
  crRNA array
  misc_feature (148)..(157): n is a, c, g, or t
cttggctttatatatcttgtggaaaggacgaaacaccgtaatttctactaagtgtagattatcgaacgctatcgaacgttaatttctactaagtgtagatcgaccgaggttacgctgggataatttctactaagtgtagatttttttnnnnnnnnnnaagcttggcgtggatccgatatcaactagatcttgagacaaatggcagtattcatccacaattttaaaagaaaaggggggattggggggtacagtgcaggggaaagaatagtagacataatagcaacagacatacaaactaaag

SEQ ID NO: 21654 - DNA, 301 bp, Artificial Sequence
  NTC.17_NTC.46
  crRNA array
  misc_feature (148)..(157): n is a, c, g, or t
cttggctttatatatcttgtggaaaggacgaaacaccgtaatttctactaagtgtagattatcgaacgctatcgaacgttaatttctactaagtgtagatagcgggtcgtagacgcgcggtaatttctactaagtgtagatttttttnnnnnnnnnnaagcttggcgtggatccgatatcaactagatcttgagacaaatggcagtattcatccacaattttaaaagaaaaggggggattggggggtacagtgcaggggaaagaatagtagacataatagcaacagacatacaaactaaag

SEQ ID NO: 21655 - DNA, 301 bp, Artificial Sequence
  NTC.17_NTC.35
  crRNA array
  misc_feature (148)..(157): n is a, c, g, or t
cttggctttatatatcttgtggaaaggacgaaacaccgtaatttctactaagtgtagattatcgaacgctatcgaacgttaatttctactaagtgtagattggcgcgtaatcgctattcgtaatttctactaagtgtagatttttttnnnnnnnnnnaagcttggcgtggatccgatatcaactagatcttgagacaaatggcagtattcatccacaattttaaaagaaaaggggggattggggggtacagtgcaggggaaagaatagtagacataatagcaacagacatacaaactaaag

SEQ ID NO: 21656 - DNA, 301 bp, Artificial Sequence
  NTC.17_NTC.10
  crRNA array
  misc_feature (148)..(157): n is a, c, g, or t
cttggctttatatatcttgtggaaaggacgaaacaccgtaatttctactaagtgtagattatcgaacgctatcgaacgttaatttctactaagtgtagatcgctaagttcgcgcgggccgtaatttctactaagtgtagatttttttnnnnnnnnnnaagcttggcgtggatccgatatcaactagatcttgagacaaatggcagtattcatccacaattttaaaagaaaaggggggattggggggtacagtgcaggggaaagaatagtagacataatagcaacagacatacaaactaaag

SEQ ID NO: 21657 - DNA, 301 bp, Artificial Sequence
  NTC.17_NTC.11
  crRNA array
  misc_feature (148)..(157): n is a, c, g, or t
cttggctttatatatcttgtggaaaggacgaaacaccgtaatttctactaagtgtagattatcgaacgctatcgaacgttaatttctactaagtgtagatcgttcgtcgacgaagcaatctaatttctactaagtgtagatttttttnnnnnnnnnnaagcttggcgtggatccgatatcaactagatcttgagacaaatggcagtattcatccacaattttaaaagaaaaggggggattggggggtacagtgcaggggaaagaatagtagacataatagcaacagacatacaaactaaag

SEQ ID NO: 21658 - DNA, 301 bp, Artificial Sequence
  NTC.17_NTC.14
  crRNA array
  misc_feature (148)..(157): n is a, c, g, or t
cttggctttatatatcttgtggaaaggacgaaacaccgtaatttctactaagtgtagattatcgaacgctatcgaacgttaatttctactaagtgtagatccgttcgtgcgatagtgttttaatttctactaagtgtagatttttttnnnnnnnnnnaagcttggcgtggatccgatatcaactagatcttgagacaaatggcagtattcatccacaattttaaaagaaaaggggggattggggggtacagtgcaggggaaagaatagtagacataatagcaacagacatacaaactaaag

SEQ ID NO: 21659 - DNA, 301 bp, Artificial Sequence
  NTC.17_NTC.28
  crRNA array
  misc_feature (148)..(157): n is a, c, g, or t
cttggctttatatatcttgtggaaaggacgaaacaccgtaatttctactaagtgtagattatcgaacgctatcgaacgttaatttctactaagtgtagataccgctaatcggcgtaaacttaatttctactaagtgtagatttttttnnnnnnnnnnaagcttggcgtggatccgatatcaactagatcttgagacaaatggcagtattcatccacaattttaaaagaaaaggggggattggggggtacagtgcaggggaaagaatagtagacataatagcaacagacatacaaactaaag

SEQ ID NO: 21660 - DNA, 301 bp, Artificial Sequence
  NTC.9_NTC.30
  crRNA array
  misc_feature (148)..(157): n is a, c, g, or t
cttggctttatatatcttgtggaaaggacgaaacaccgtaatttctactaagtgtagatatcgccgtacggctatggcataatttctactaagtgtagatcgatcgtacgggtgtcctaataatttctactaagtgtagatttttttnnnnnnnnnnaagcttggcgtggatccgatatcaactagatcttgagacaaatggcagtattcatccacaattttaaaagaaaaggggggattggggggtacagtgcaggggaaagaatagtagacataatagcaacagacatacaaactaaag

SEQ ID NO: 21661 - DNA, 301 bp, Artificial Sequence
  NTC.9_NTC.8
  crRNA array
  misc_feature (148)..(157): n is a, c, g, or t
cttggctttatatatcttgtggaaaggacgaaacaccgtaatttctactaagtgtagatatcgccgtacggctatggcataatttctactaagtgtagatcgaccgaggttacgctgggataatttctactaagtgtagatttttttnnnnnnnnnnaagcttggcgtggatccgatatcaactagatcttgagacaaatggcagtattcatccacaattttaaaagaaaaggggggattggggggtacagtgcaggggaaagaatagtagacataatagcaacagacatacaaactaaag

SEQ ID NO: 21662 - DNA, 301 bp, Artificial Sequence
  NTC.9_NTC.46
  crRNA array
  misc_feature (148)..(157): n is a, c, g, or t
cttggctttatatatcttgtggaaaggacgaaacaccgtaatttctactaagtgtagatatcgccgtacggctatggcataatttctactaagtgtagatagcgggtcgtagacgcgcggtaatttctactaagtgtagatttttttnnnnnnnnnnaagcttggcgtggatccgatatcaactagatcttgagacaaatggcagtattcatccacaattttaaaagaaaaggggggattggggggtacagtgcaggggaaagaatagtagacataatagcaacagacatacaaactaaag

SEQ ID NO: 21663 - DNA, 301 bp, Artificial Sequence
  NTC.9_NTC.35
  crRNA array
  misc_feature (148)..(157): n is a, c, g, or t
cttggctttatatatcttgtggaaaggacgaaacaccgtaatttctactaagtgtagatatcgccgtacggctatggcataatttctactaagtgtagattggcgcgtaatcgctattcgtaatttctactaagtgtagatttttttnnnnnnnnnnaagcttggcgtggatccgatatcaactagatcttgagacaaatggcagtattcatccacaattttaaaagaaaaggggggattggggggtacagtgcaggggaaagaatagtagacataatagcaacagacatacaaactaaag

SEQ ID NO: 21664 - DNA, 301 bp, Artificial Sequence
  NTC.9_NTC.10
  crRNA array
  misc_feature (148)..(157): n is a, c, g, or t
cttggctttatatatcttgtggaaaggacgaaacaccgtaatttctactaagtgtagatatcgccgtacggctatggcataatttctactaagtgtagatcgctaagttcgcgcgggccgtaatttctactaagtgtagatttttttnnnnnnnnnnaagcttggcgtggatccgatatcaactagatcttgagacaaatggcagtattcatccacaattttaaaagaaaaggggggattggggggtacagtgcaggggaaagaatagtagacataatagcaacagacatacaaactaaag

SEQ ID NO: 21665 - DNA, 301 bp, Artificial Sequence
  NTC.9_NTC.11
  crRNA array
  misc_feature (148)..(157): n is a, c, g, or t
cttggctttatatatcttgtggaaaggacgaaacaccgtaatttctactaagtgtagatatcgccgtacggctatggcataatttctactaagtgtagatcgttcgtcgacgaagcaatctaatttctactaagtgtagatttttttnnnnnnnnnnaagcttggcgtggatccgatatcaactagatcttgagacaaatggcagtattcatccacaattttaaaagaaaaggggggattggggggtacagtgcaggggaaagaatagtagacataatagcaacagacatacaaactaaag

SEQ ID NO: 21666 - DNA, 301 bp, Artificial Sequence
  NTC.9_NTC.14
  crRNA array
  misc_feature (148)..(157): n is a, c, g, or t
cttggctttatatatcttgtggaaaggacgaaacaccgtaatttctactaagtgtagatatcgccgtacggctatggcataatttctactaagtgtagatccgttcgtgcgatagtgttttaatttctactaagtgtagatttttttnnnnnnnnnnaagcttggcgtggatccgatatcaactagatcttgagacaaatggcagtattcatccacaattttaaaagaaaaggggggattggggggtacagtgcaggggaaagaatagtagacataatagcaacagacatacaaactaaag

SEQ ID NO: 21667 - DNA, 301 bp, Artificial Sequence
  NTC.9_NTC.28
  crRNA array
  misc_feature (148)..(157): n is a, c, g, or t
cttggctttatatatcttgtggaaaggacgaaacaccgtaatttctactaagtgtagatatcgccgtacggctatggcataatttctactaagtgtagataccgctaatcggcgtaaacttaatttctactaagtgtagatttttttnnnnnnnnnnaagcttggcgtggatccgatatcaactagatcttgagacaaatggcagtattcatccacaattttaaaagaaaaggggggattggggggtacagtgcaggggaaagaatagtagacataatagcaacagacatacaaactaaag

SEQ ID NO: 21668 - DNA, 301 bp, Artificial Sequence
  NTC.30_NTC.8
  crRNA array
  misc_feature (148)..(157): n is a, c, g, or t
cttggctttatatatcttgtggaaaggacgaaacaccgtaatttctactaagtgtagatcgatcgtacgggtgtcctaataatttctactaagtgtagatcgaccgaggttacgctgggataatttctactaagtgtagatttttttnnnnnnnnnnaagcttggcgtggatccgatatcaactagatcttgagacaaatggcagtattcatccacaattttaaaagaaaaggggggattggggggtacagtgcaggggaaagaatagtagacataatagcaacagacatacaaactaaag

SEQ ID NO: 21669 - DNA, 301 bp, Artificial Sequence
  NTC.30_NTC.46
  crRNA array
  misc_feature (148)..(157): n is a, c, g, or t
cttggctttatatatcttgtggaaaggacgaaacaccgtaatttctactaagtgtagatcgatcgtacgggtgtcctaataatttctactaagtgtagatagcgggtcgtagacgcgcggtaatttctactaagtgtagatttttttnnnnnnnnnnaagcttggcgtggatccgatatcaactagatcttgagacaaatggcagtattcatccacaattttaaaagaaaaggggggattggggggtacagtgcaggggaaagaatagtagacataatagcaacagacatacaaactaaag

SEQ ID NO: 21670 - DNA, 301 bp, Artificial Sequence
  NTC.30_NTC.35
  crRNA array
  misc_feature (148)..(157): n is a, c, g, or t
cttggctttatatatcttgtggaaaggacgaaacaccgtaatttctactaagtgtagatcgatcgtacgggtgtcctaataatttctactaagtgtagattggcgcgtaatcgctattcgtaatttctactaagtgtagatttttttnnnnnnnnnnaagcttggcgtggatccgatatcaactagatcttgagacaaatggcagtattcatccacaattttaaaagaaaaggggggattggggggtacagtgcaggggaaagaatagtagacataatagcaacagacatacaaactaaag

SEQ ID NO: 21671 - DNA, 301 bp, Artificial Sequence
  NTC.30_NTC.10
  crRNA array
  misc_feature (148)..(157): n is a, c, g, or t
cttggctttatatatcttgtggaaaggacgaaacaccgtaatttctactaagtgtagatcgatcgtacgggtgtcctaataatttctactaagtgtagatcgctaagttcgcgcgggccgtaatttctactaagtgtagatttttttnnnnnnnnnnaagcttggcgtggatccgatatcaactagatcttgagacaaatggcagtattcatccacaattttaaaagaaaaggggggattggggggtacagtgcaggggaaagaatagtagacataatagcaacagacatacaaactaaag

SEQ ID NO: 21672 - DNA, 301 bp, Artificial Sequence
  NTC.30_NTC.11
  crRNA array
  misc_feature (148)..(157): n is a, c, g, or t
cttggctttatatatcttgtggaaaggacgaaacaccgtaatttctactaagtgtagatcgatcgtacgggtgtcctaataatttctactaagtgtagatcgttcgtcgacgaagcaatctaatttctactaagtgtagatttttttnnnnnnnnnnaagcttggcgtggatccgatatcaactagatcttgagacaaatggcagtattcatccacaattttaaaagaaaaggggggattggggggtacagtgcaggggaaagaatagtagacataatagcaacagacatacaaactaaag

SEQ ID NO: 21673 - DNA, 301 bp, Artificial Sequence
  NTC.30_NTC.14
  crRNA array
  misc_feature (148)..(157): n is a, c, g, or t
cttggctttatatatcttgtggaaaggacgaaacaccgtaatttctactaagtgtagatcgatcgtacgggtgtcctaataatttctactaagtgtagatccgttcgtgcgatagtgttttaatttctactaagtgtagatttttttnnnnnnnnnnaagcttggcgtggatccgatatcaactagatcttgagacaaatggcagtattcatccacaattttaaaagaaaaggggggattggggggtacagtgcaggggaaagaatagtagacataatagcaacagacatacaaactaaag

SEQ ID NO: 21674 - DNA, 301 bp, Artificial Sequence
  NTC.30_NTC.28
  crRNA array
  misc_feature (148)..(157): n is a, c, g, or t
cttggctttatatatcttgtggaaaggacgaaacaccgtaatttctactaagtgtagatcgatcgtacgggtgtcctaataatttctactaagtgtagataccgctaatcggcgtaaacttaatttctactaagtgtagatttttttnnnnnnnnnnaagcttggcgtggatccgatatcaactagatcttgagacaaatggcagtattcatccacaattttaaaagaaaaggggggattggggggtacagtgcaggggaaagaatagtagacataatagcaacagacatacaaactaaag

SEQ ID NO: 21675 - DNA, 301 bp, Artificial Sequence
  NTC.8_NTC.46
  crRNA array
  misc_feature (148)..(157): n is a, c, g, or t
cttggctttatatatcttgtggaaaggacgaaacaccgtaatttctactaagtgtagatcgaccgaggttacgctgggataatttctactaagtgtagatagcgggtcgtagacgcgcggtaatttctactaagtgtagatttttttnnnnnnnnnnaagcttggcgtggatccgatatcaactagatcttgagacaaatggcagtattcatccacaattttaaaagaaaaggggggattggggggtacagtgcaggggaaagaatagtagacataatagcaacagacatacaaactaaag

SEQ ID NO: 21676 - DNA, 301 bp, Artificial Sequence
  NTC.8_NTC.35
  crRNA array
  misc_feature (148)..(157): n is a, c, g, or t
cttggctttatatatcttgtggaaaggacgaaacaccgtaatttctactaagtgtagatcgaccgaggttacgctgggataatttctactaagtgtagattggcgcgtaatcgctattcgtaatttctactaagtgtagatttttttnnnnnnnnnnaagcttggcgtggatccgatatcaactagatcttgagacaaatggcagtattcatccacaattttaaaagaaaaggggggattggggggtacagtgcaggggaaagaatagtagacataatagcaacagacatacaaactaaag

SEQ ID NO: 21677 - DNA, 301 bp, Artificial Sequence
  NTC.8_NTC.10
  crRNA array
  misc_feature (148)..(157): n is a, c, g, or t
cttggctttatatatcttgtggaaaggacgaaacaccgtaatttctactaagtgtagatcgaccgaggttacgctgggataatttctactaagtgtagatcgctaagttcgcgcgggccgtaatttctactaagtgtagatttttttnnnnnnnnnnaagcttggcgtggatccgatatcaactagatcttgagacaaatggcagtattcatccacaattttaaaagaaaaggggggattggggggtacagtgcaggggaaagaatagtagacataatagcaacagacatacaaactaaag

SEQ ID NO: 21678 - DNA, 301 bp, Artificial Sequence
  NTC.8_NTC.11
  crRNA array
  misc_feature (148)..(157): n is a, c, g, or t
cttggctttatatatcttgtggaaaggacgaaacaccgtaatttctactaagtgtagatcgaccgaggttacgctgggataatttctactaagtgtagatcgttcgtcgacgaagcaatctaatttctactaagtgtagatttttttnnnnnnnnnnaagcttggcgtggatccgatatcaactagatcttgagacaaatggcagtattcatccacaattttaaaagaaaaggggggattggggggtacagtgcaggggaaagaatagtagacataatagcaacagacatacaaactaaag

SEQ ID NO: 21679 - DNA, 301 bp, Artificial Sequence
  NTC.8_NTC.14
  crRNA array
  misc_feature (148)..(157): n is a, c, g, or t
cttggctttatatatcttgtggaaaggacgaaacaccgtaatttctactaagtgtagatcgaccgaggttacgctgggataatttctactaagtgtagatccgttcgtgcgatagtgttttaatttctactaagtgtagatttttttnnnnnnnnnnaagcttggcgtggatccgatatcaactagatcttgagacaaatggcagtattcatccacaattttaaaagaaaaggggggattggggggtacagtgcaggggaaagaatagtagacataatagcaacagacatacaaactaaag

SEQ ID NO: 21680 - DNA, 301 bp, Artificial Sequence
  NTC.8_NTC.28
  crRNA array
  misc_feature (148)..(157): n is a, c, g, or t
cttggctttatatatcttgtggaaaggacgaaacaccgtaatttctactaagtgtagatcgaccgaggttacgctgggataatttctactaagtgtagataccgctaatcggcgtaaacttaatttctactaagtgtagatttttttnnnnnnnnnnaagcttggcgtggatccgatatcaactagatcttgagacaaatggcagtattcatccacaattttaaaagaaaaggggggattggggggtacagtgcaggggaaagaatagtagacataatagcaacagacatacaaactaaag

SEQ ID NO: 21681 - DNA, 301 bp, Artificial Sequence
  NTC.46_NTC.35
  crRNA array
  misc_feature (148)..(157): n is a, c, g, or t
cttggctttatatatcttgtggaaaggacgaaacaccgtaatttctactaagtgtagatagcgggtcgtagacgcgcggtaatttctactaagtgtagattggcgcgtaatcgctattcgtaatttctactaagtgtagatttttttnnnnnnnnnnaagcttggcgtggatccgatatcaactagatcttgagacaaatggcagtattcatccacaattttaaaagaaaaggggggattggggggtacagtgcaggggaaagaatagtagacataatagcaacagacatacaaactaaag

SEQ ID NO: 21682 - DNA, 301 bp, Artificial Sequence
  NTC.46_NTC.10
  crRNA array
  misc_feature (148)..(157): n is a, c, g, or t
cttggctttatatatcttgtggaaaggacgaaacaccgtaatttctactaagtgtagatagcgggtcgtagacgcgcggtaatttctactaagtgtagatcgctaagttcgcgcgggccgtaatttctactaagtgtagatttttttnnnnnnnnnnaagcttggcgtggatccgatatcaactagatcttgagacaaatggcagtattcatccacaattttaaaagaaaaggggggattggggggtacagtgcaggggaaagaatagtagacataatagcaacagacatacaaactaaag

SEQ ID NO: 21683 - DNA, 301 bp, Artificial Sequence
  NTC.46_NTC.11
  crRNA array
  misc_feature (148)..(157): n is a, c, g, or t
cttggctttatatatcttgtggaaaggacgaaacaccgtaatttctactaagtgtagatagcgggtcgtagacgcgcggtaatttctactaagtgtagatcgttcgtcgacgaagcaatctaatttctactaagtgtagatttttttnnnnnnnnnnaagcttggcgtggatccgatatcaactagatcttgagacaaatggcagtattcatccacaattttaaaagaaaaggggggattggggggtacagtgcaggggaaagaatagtagacataatagcaacagacatacaaactaaag

SEQ ID NO: 21684 - DNA, 301 bp, Artificial Sequence
  NTC.46_NTC.14
  crRNA array
  misc_feature (148)..(157): n is a, c, g, or t
cttggctttatatatcttgtggaaaggacgaaacaccgtaatttctactaagtgtagatagcgggtcgtagacgcgcggtaatttctactaagtgtagatccgttcgtgcgatagtgttttaatttctactaagtgtagatttttttnnnnnnnnnnaagcttggcgtggatccgatatcaactagatcttgagacaaatggcagtattcatccacaattttaaaagaaaaggggggattggggggtacagtgcaggggaaagaatagtagacataatagcaacagacatacaaactaaag

SEQ ID NO: 21685 - DNA, 301 bp, Artificial Sequence
  NTC.46_NTC.28
  crRNA array
  misc_feature (148)..(157): n is a, c, g, or t
cttggctttatatatcttgtggaaaggacgaaacaccgtaatttctactaagtgtagatagcgggtcgtagacgcgcggtaatttctactaagtgtagataccgctaatcggcgtaaacttaatttctactaagtgtagatttttttnnnnnnnnnnaagcttggcgtggatccgatatcaactagatcttgagacaaatggcagtattcatccacaattttaaaagaaaaggggggattggggggtacagtgcaggggaaagaatagtagacataatagcaacagacatacaaactaaag

SEQ ID NO: 21686 - DNA, 301 bp, Artificial Sequence
  NTC.35_NTC.10
  crRNA array
  misc_feature (148)..(157): n is a, c, g, or t
cttggctttatatatcttgtggaaaggacgaaacaccgtaatttctactaagtgtagattggcgcgtaatcgctattcgtaatttctactaagtgtagatcgctaagttcgcgcgggccgtaatttctactaagtgtagatttttttnnnnnnnnnnaagcttggcgtggatccgatatcaactagatcttgagacaaatggcagtattcatccacaattttaaaagaaaaggggggattggggggtacagtgcaggggaaagaatagtagacataatagcaacagacatacaaactaaag

SEQ ID NO: 21687 - DNA, 301 bp, Artificial Sequence
  NTC.35_NTC.11
  crRNA array
  misc_feature (148)..(157): n is a, c, g, or t
cttggctttatatatcttgtggaaaggacgaaacaccgtaatttctactaagtgtagattggcgcgtaatcgctattcgtaatttctactaagtgtagatcgttcgtcgacgaagcaatctaatttctactaagtgtagatttttttnnnnnnnnnnaagcttggcgtggatccgatatcaactagatcttgagacaaatggcagtattcatccacaattttaaaagaaaaggggggattggggggtacagtgcaggggaaagaatagtagacataatagcaacagacatacaaactaaag

SEQ ID NO: 21688 - DNA, 301 bp, Artificial Sequence
  NTC.35_NTC.14
  crRNA array
  misc_feature (148)..(157): n is a, c, g, or t
cttggctttatatatcttgtggaaaggacgaaacaccgtaatttctactaagtgtagattggcgcgtaatcgctattcgtaatttctactaagtgtagatccgttcgtgcgatagtgttttaatttctactaagtgtagatttttttnnnnnnnnnnaagcttggcgtggatccgatatcaactagatcttgagacaaatggcagtattcatccacaattttaaaagaaaaggggggattggggggtacagtgcaggggaaagaatagtagacataatagcaacagacatacaaactaaag

SEQ ID NO: 21689 - DNA, 301 bp, Artificial Sequence
  NTC.35_NTC.28
  crRNA array
  misc_feature (148)..(157): n is a, c, g, or t
cttggctttatatatcttgtggaaaggacgaaacaccgtaatttctactaagtgtagattggcgcgtaatcgctattcgtaatttctactaagtgtagataccgctaatcggcgtaaacttaatttctactaagtgtagatttttttnnnnnnnnnnaagcttggcgtggatccgatatcaactagatcttgagacaaatggcagtattcatccacaattttaaaagaaaaggggggattggggggtacagtgcaggggaaagaatagtagacataatagcaacagacatacaaactaaag

SEQ ID NO: 21690 - DNA, 301 bp, Artificial Sequence
  NTC.10_NTC.11
  crRNA array
  misc_feature (148)..(157): n is a, c, g, or t
cttggctttatatatcttgtggaaaggacgaaacaccgtaatttctactaagtgtagatcgctaagttcgcgcgggccgtaatttctactaagtgtagatcgttcgtcgacgaagcaatctaatttctactaagtgtagatttttttnnnnnnnnnnaagcttggcgtggatccgatatcaactagatcttgagacaaatggcagtattcatccacaattttaaaagaaaaggggggattggggggtacagtgcaggggaaagaatagtagacataatagcaacagacatacaaactaaag

SEQ ID NO: 21691 - DNA, 301 bp, Artificial Sequence
  NTC.10_NTC.14
  crRNA array
  misc_feature (148)..(157): n is a, c, g, or t
cttggctttatatatcttgtggaaaggacgaaacaccgtaatttctactaagtgtagatcgctaagttcgcgcgggccgtaatttctactaagtgtagatccgttcgtgcgatagtgttttaatttctactaagtgtagatttttttnnnnnnnnnnaagcttggcgtggatccgatatcaactagatcttgagacaaatggcagtattcatccacaattttaaaagaaaaggggggattggggggtacagtgcaggggaaagaatagtagacataatagcaacagacatacaaactaaag

SEQ ID NO: 21692 - DNA, 301 bp, Artificial Sequence
  NTC.10_NTC.28
  crRNA array
  misc_feature (148)..(157): n is a, c, g, or t
cttggctttatatatcttgtggaaaggacgaaacaccgtaatttctactaagtgtagatcgctaagttcgcgcgggccgtaatttctactaagtgtagataccgctaatcggcgtaaacttaatttctactaagtgtagatttttttnnnnnnnnnnaagcttggcgtggatccgatatcaactagatcttgagacaaatggcagtattcatccacaattttaaaagaaaaggggggattggggggtacagtgcaggggaaagaatagtagacataatagcaacagacatacaaactaaag

SEQ ID NO: 21693 - DNA, 301 bp, Artificial Sequence
  NTC.11_NTC.14
  crRNA array
  misc_feature (148)..(157): n is a, c, g, or t
cttggctttatatatcttgtggaaaggacgaaacaccgtaatttctactaagtgtagatcgttcgtcgacgaagcaatctaatttctactaagtgtagatccgttcgtgcgatagtgttttaatttctactaagtgtagatttttttnnnnnnnnnnaagcttggcgtggatccgatatcaactagatcttgagacaaatggcagtattcatccacaattttaaaagaaaaggggggattggggggtacagtgcaggggaaagaatagtagacataatagcaacagacatacaaactaaag

SEQ ID NO: 21694 - DNA, 301 bp, Artificial Sequence
  NTC.11_NTC.28
  crRNA array
  misc_feature (148)..(157): n is a, c, g, or t
cttggctttatatatcttgtggaaaggacgaaacaccgtaatttctactaagtgtagatcgttcgtcgacgaagcaatctaatttctactaagtgtagataccgctaatcggcgtaaacttaatttctactaagtgtagatttttttnnnnnnnnnnaagcttggcgtggatccgatatcaactagatcttgagacaaatggcagtattcatccacaattttaaaagaaaaggggggattggggggtacagtgcaggggaaagaatagtagacataatagcaacagacatacaaactaaag

SEQ ID NO: 21695 - DNA, 295 bp, Artificial Sequence
  NTC.14_NTC.28
  crRNA array
  misc_feature (148)..(157): n is a, c, g, or t
cttggctttatatatcttgtggaaaggacgaaacaccgtaatttctactaagtgtagatccgttcgtgcgatagtgttttaatttctactaagtgtagataccgctaatcggcgtaaacttaatttctactaagtgtagatttttttnnnnnnnnnnaagcttggcgtggatccgatatcaactagatcttgagacaaatggcagtattcatccacaattttaaaagaaaaggggggattggggggtacagtgcaggggaaagaatagtagacataatagcaacagacatacaaa

SEQ ID NO: 21696 - DNA, 21 bp, Artificial Sequence
  Artificially generated sequence
taatttctactaagtgtagat

SEQ ID NO: 21697 - DNA, 12779 bp, Artificial Sequence
  vector
  misc_feature (4269)..(4288): n is a, c, g, or t
  misc_feature (4301)..(4320): n is a, c, g, or t
tctcgtcctcggccttcttgaactggccgatggcccacagcacctttctggcgatgttataggcgccattggcgtcggcgttctttggcaggatggcattctcctgggcctcatagttccggctatcgtagaagatgccgtcggagttcttcacagggctgatcagaaaatccacgtcggtgcggcctgtgatgctgttccgcatctgcagcatcaggctcatcagggccataaagctagagtagaaggccttgtcggactgctcgcacagcagggctctgatatcgccctgctgataattgatgccgtacttgttgaacagctccttataggcgctggtcaggcacacctcctcccagtcgaacacgttgttcttcttaggattccggaagattctgatccggttgccgtaggagtacagcttccacttcttgatgtaatcggcgtctgtgcgagagaagttcttatagtccagggcaaactcgaacagatcctcctcgggcacgtacatgatcctgtcaaaggagctgatgaacttcttggaatcggcgatgctggtatacttggttttcagcaggttcacaaagccggtagatggatcgatcttggatgtcagccaggcagggatgtaaaagatgaagccgttctgggtagacatggacttaaagctctcgaacttattggtgatctgatagcccttcagggcgccgcctgttgcacaaggattagacttcttgtccaccatgtagttcagcttatcgatcagcatcttctcgaacttctgatacacctgcttctccaccttcacgcggctattcttaaagccagagttcaggtcctccagggcgatcacggcatcgtacttctccaccagctcgcagatcttgtgcaccacctgagagatatagccggccttcagctccttgatattctcgatggaggtccagttctggcgggcctcgaacctctccttctccttcttgtccagcagagagtggtaatctgtcttgatcctgatgccgttgaagttgttgatgatctcgttcagggaatactgctccacgatgttgcccttgccgtccaccaccacgatatacagcagattgcgctcgcccctatcgatgccgatcacataggggttatcgtcgtgcttcagcagcacgcgcacctctgtattgatcttgaagatgttcttggggcacttattgatggcgattgggatgtgcagctcgtactggtcctcagaaaacctcttatccttatacacgtcgtaggacagggttgtggttttcttgggattatctggattcttgttggcgataggggagttggctgggtgcaccaccagctcctccttcttcagggaggcgcgcctcatgaacagctctgctcctccgctcagcctgatctgtccgtgattgttctcgtcaaacagcagcttgaagtacatggtgtgcagattgggtgtgccgtgagacttatcggaaaagtccttgttatagatctggaacatatacagcttgccctcctccaccagcttatccacctccttcttgctggcagactcgaagctcaccttatagccctgctcctccacctctctgtaaaagccggcgatgtccttatacttctctgtctcagaaaagttgaaatcgtaggcattggaccactttggataccgggagatgctatccttaaagaagtcgatcagcttgtgacagtcattcaggttaaacatatcgcccttcttgaatgtgccattcttgtagatcttctggatgtcctcgctggggttatagtaggccatccacttcttagaaaagaacacctttggcagcatcttattagggccgggcagcagcttatagttgatcttctcgtaattgccgttcacatcgtccttgtcgatcttctgcaggcacttggcgtacttcttatccatgatggccagatagtacttggagccgtatctcaggatggtggcccgatagtctgtctccttatccttgtcccagccgcccatgaactgagggttctgaaaatacagcttgaacttatccttagagtagggcttctgggtcacataattgcggatggcatcgtagatgtggtccaccttcagcaggatgtcgtaggccagcacaaaatcgccatagaaggactcgtccctgtttgtctccttgccctcgccaaagaaggccttgatgtaattctcgaagctcttcacagaatccagcaggtccttcatgatggccaccacggcgtcgttcttcttcaggctcttctccagcacaaaatcggcgtcgaacagcttctcagaggagccatacaccttgtagatctcatccaccttctggatgatgatctccttcagcttctccaccacagacagatcggcgtcggcgtactcctgcagctgctccagagaaaaggagccgatcttcttgaaggactttctccgatcgtcctcgtacttctcggtcaccacggccttcttcttcaggtggatatcgtcatactcggcattccacttgtcccggatcacgttccactcgccgaagatatccttggagattgtgctgatggcggggccgttcttcacaaagatgccggcgctagagtactcgtcaaaattcttgaacagcttctccagcttcttgatggagctgaagatctcgctgttcttgttcagggtgtttctaaacacctccagcacctcctcatcggatgtatagccctcgccgtagaagctcagagactcccgatcgctcagcacctgcttatacagtggcttaaacttaggcagcttctgcttggttttctgattatacaggttgatgtactcgttcaggcccttgatcttctcgccgctctcggtcacgaagccgccgatgatggcgttatacacgtcgatgccctcctgtgtcagcacaaagttaaagaactcgccctcaaagaaatcctccacatcatagtcgctgttcaggatcttctccttgatctcctgcacctcgtgcttatcaaagatggcgtccaccttctcgaagatgtccatattagagatgtagcgggtcagattctcgttgatacacctgaaggcgatggatgtgctcttggcctcctcggaaaacatattctctctgttatcaaagaagccggtgaaggctgtggtaaagccattgaagctgttcaccagggcgatctcgtccttatcgtccaggaactctggcaggattgtctcgatgatatccttcttaaacagggacttgtagccctcgttgcccttgaaggccttggcgatctccttccgcagattgatctccaggttctccagctccttattctccttctcggttctggttttcttccggaacaggctgatgtaattgttcagattcttcagcttgatgctgtgcagcacgtcgttgataaaagacagatagtagcgatccagcagcttcttcacgcccttataatcctcggctctcttctcgtcctccaccagcagccgcttattgtcgatgttctcctgggtcttgcccacagggatggccttgaacctcagggtcttagacagggagtagcagtttgtaaacttctccagcttgctggctgctgggactccgtggataccgaccttccgcttcttctttggggccatggtggcaccggacctgtgttctggcggcaaacccgttgcgaaaaagaacgttcacggcgactactgcacttatatacggttctcccccaccctcgggaaaaaggcggagccagtacacgacatcactttcccagtttaccccgcgccaccttctctaggcaccggatcaattgccgacccctccccccaacttctcggggactgtgggcgatgtgcgctctgcccactgacgggcaccggagccaattcccactcctttcaagacctctcgagaagagggcctatttcccatgattccttcatatttgcatatacgatacaaggctgttagagagataattggaattaatttgactgtaaacacaaagatattagtacaaaatacgtgacgtagaaagtaataatttcttgggtagtttgcagttttaaaattatgttttaaaatggactatcatatgcttaccgtaacttgaaagtatttcgatttcttggctttatatatcttgtggaaaggacgaaacaccgtaatttctactaagtgtagatagcgctataacttcgtatagcatacattatacgaacggtataatttctactaagtgtagatnnnnnnnnnnnnnnnnnnnnttttttaaaaaannnnnnnnnnnnnnnnnnnnatctacacttagtagaaattaataacttcgtataatgtatgctatacgaacggtatttttttaattaaattaaccaaactggatctctgctgtccctgtaataaacccgaaaattttgaatttttgtaatttgtttttgtaattctttagtttgtatgtctgttgctattatgtctactattctttcccctgcactgtaccccccaatccccccttttcttttaaaattgtggatgaatactgccatttgtctgcagaattggcgcacgcagtgccgatccgttcactaatcgaatggatctgtctctgtctctctctccaccttcttcttctattccttcgggcctgtcgggtcccctcggggttgggaggtgggtctgaaacgataatggtgaatatccctgcctaactctattcactatagaaagtacagcaaaaactattcttaaacctaccaagcctcctactatcattatgaataattttatataccacagccaatttgttatgttaaaccaattccacaaacttgcccatttatctaattccaataattcttgttcattcttttcttgctggttttgcgattcttcaattaaggagtgtattaagcttgtgtaattgttaatttctctgtcccactccatccaggtcgtgtgattccaaatctgttccagagatttattactccaactagcattccaaggcacagcagtggtgcaaatgagttttccagagcaaccccaaatccccaggagctgttgatcctttaggtatctttccacagccaggattcttgcctggagctgcttgatgccccagactgtgagttgcaacagatgctgttgcgcctcaatagccctcagcaaattgttctgctgctgcactataccagacaataattgtctggcctgtaccgtcagcgtcattgacgctgcgcccatagtgcttcctgctgctcccaagaacccaaggaacaaagctcctattcccactgctcttttttctctctgcaccactcttctctttgccttggtgggtgctactcctaatggttcaatttttactactttatatttatataattcacttctccaattgtccctcatatctcctcctccaggtctgaagatcagcggccgcttgctgtgcggtggtcttacttttgttttgctcttcctctatcttgtctaaagcttccttggtgtcttttatctctatcctttgatgcacacaatagagggttgctactgtattatataatgatctaagttcttctgatcctgtctgaagggatggttgtagctgtcccagtatttgtctacagccttctgatgtttctaacaggccaggattaactgcgaatcgttctagctccctgcttgcccatactatatgttttaatttatattttttctttccccctggccttaaccgaattttttcccatcgcgatctaattctcccccgcttaatactgacgctctcgcacccatctctctccttctagcctccgctagtcaaaatttttggcgtactcaccagtcgccgcccctcgcctcttgccgtgcgcgcttcagcaagccgagtcctgcgtcgagagagctcctctggtttccctttcgctttcaagtccctgttcgggcgccactgctagagattttccacactgactaaaagggtctgagggatctctagttaccagagtcacacaacagacgggcacacactacttgaagcactcaaggcaagctttattgaggcttaagcagtgggttccctagttagccagagagctcccaggctcagatctggtctaaccagagagacccagtacaggcaaaacgcgctgcttatatagacctcccaccgtacacgcctaccgcccatttgcgtcaatggggcggagttgttacgacattttggaaagtcccgttgattttggtgccaaaacaaactcccattgacgtcaatggggtggagacttggaaatccccgtgagtcaaaccgctatccacgcccattgatgtactgccaaaaccgcatcaccatggtaatagcgatgactaatacgtagatgtactgccaagtaggaaagtcccataaggtcatgtactgggcataatgccaggcgggccatttaccgtcattgacgtcaatagggggcgtacttggcatatgatacacttgatgtactgccaagtgggcagtttaccgtaaatactccacccattgacgtcaatggaaagtccctattggcgttactatgggaacatacgtcattattgacgtcaatgggcgggggtcgttgggcggtcagccaggcgggccatttaccgtaagttatgtaacgcggaactccatatatgggctatgaactaatgaccccgtaattgattactattaataactagtcaataatcaatgtcaacgcgtatatctggcccgtacatcgcgaagcagcgcaaaacgcctaaccctaagcagattcttcatgcaattgtcggtcaagccttgccttgttgtagcttaaattttgctcgcgcactactcagcgacctccaacacacaagcagggagcagatactggcttaactatgcggcatcagagcagattgtactgagagtgcaccataggggatcgggagatctcccgatccgtcgacgtcaggtggcacttttcggggaaatgtgcgcggaacccctatttgtttatttttctaaatacattcaaatatgtatccgctcatgagacaataaccctgataaatgcttcaataatattgaaaaaggaagagtatgagtattcaacatttccgtgtcgcccttattcccttttttgcggcattttgccttcctgtttttgctcacccagaaacgctggtgaaagtaaaagatgctgaagatcagttgggtgcacgagtgggttacatcgaactggatctcaacagcggtaagatccttgagagttttcgccccgaagaacgttttccaatgatgagcacttttaaagttctgctatgtggcgcggtattatcccgtattgacgccgggcaagagcaactcggtcgccgcatacactattctcagaatgacttggttgagtactcaccagtcacagaaaagcatcttacggatggcatgacagtaagagaattatgcagtgctgccataaccatgagtgataacactgcggccaacttacttctgacaacgatcggaggaccgaaggagctaaccgcttttttgcacaacatgggggatcatgtaactcgccttgatcgttgggaaccggagctgaatgaagccataccaaacgacgagcgtgacaccacgatgcctgtagcaatggcaacaacgttgcgcaaactattaactggcgaactacttactctagcttcccggcaacaattaatagactggatggaggcggataaagttgcaggaccacttctgcgctcggcccttccggctggctggtttattgctgataaatctggagccggtgagcgtgggtctcgcggtatcattgcagcactggggccagatggtaagccctcccgtatcgtagttatctacacgacggggagtcaggcaactatggatgaacgaaatagacagatcgctgagataggtgcctcactgattaagcattggtaactgtcagaccaagtttactcatatatactttagattgatttaaaacttcatttttaatttaaaaggatctaggtgaagatcctttttgataatctcatgaccaaaatcccttaacgtgagttttcgttccactgagcgtcagaccccgtagaaaagatcaaaggatcttcttgagatcctttttttctgcgcgtaatctgctgcttgcaaacaaaaaaaccaccgctaccagcggtggtttgtttgccggatcaagagctaccaactctttttccgaaggtaactggcttcagcagagcgcagataccaaatactgttcttctagtgtagccgtagttaggccaccacttcaagaactctgtagcaccgcctacatacctcgctctgctaatcctgttaccagtggctgctgccagtggcgataagtcgtgtcttaccgggttggactcaagacgatagttaccggataaggcgcagcggtcgggctgaacggggggttcgtgcacacagcccagcttggagcgaacgacctacaccgaactgagatacctacagcgtgagctatgagaaagcgccacgcttcccgaagggagaaaggcggacaggtatccggtaagcggcagggtcggaacaggagagcgcacgagggagcttccagggggaaacgcctggtatctttatagtcctgtcgggtttcgccacctctgacttgagcgtcgatttttgtgatgctcgtcaggggggcggagcctatggaaaaacgccagcaacgcggcctttttacggttcctggccttttgctggccttttgctcacatgttctttcctgcgttatcccctgattctgtggataaccgtattaccgcctttgagtgagctgataccgctcgccgcagccgaacgaccgagcgcagcgagtcagtgagcgaggaagcggaagagcgcccaatacgcaaaccgcctctccccgcgcgttggccgattcattaatgcagctggcacgacaggtttcccgactggaaagcgggcagtgagcgcaacgcaattaatgtgagttagctcactcattaggcaccccaggctttacactttatgcttccggctcgtatgttgtgtggaattgtgagcggataacaatttcacacaggaaacagctatgaccatgattacgccaagctctagctagaggtcgacggtatacagacatgataagatacattgatgagtttggacaaaccacaactagaatgcagtgaaaaaaatgctttatttgtgaaatttgtgatgctattgctttatttgtaaccattataagctgcaataaacaagttggggtgggcgaagaactccagcatgagatccccgcgctggaggatcatccagccggcgtcccggaaaacgattccgaagcccaacctttcatagaaggcggcggtggaatcgaaatctcgtagcacgtgtcagtcctgctcctcggccacgaagtgcacgcagttgccggccgggtcgcgcagggcgaactcccgcccccacggctgctcgccgatctcggtcatggccggcccggaggcgtcccggaagttcgtggacacgacctccgaccactcggcgtacagctcgtccaggccgcgcacccacacccaggccagggtgttgtccggcaccacctggtcctggaccgcgctgatgaacagggtcacgtcgtcccggaccacaccggcgaagtcgtcctccacgaagtcccgggagaacccgagccggtcggtccagaactcgaccgctccggcgacgtcgcgcgcggtgagcaccggaacggcactggtcaacttggccatggtttagttcctcaccttgtcgtattatactatgccgatatactatgccgatgattaattgtcaacacgtgctgatcagatccgaaaatggatatacaagctcccgggagctttttgcaaaagcctaggcctccaaaaaagcctcctcactacttctggaatagctcagaggcagaggcggcctcggcctctgcataaataaaaaaaattagtcagccatggggcggagaatgggcggaactgggcggagttaggggcgggatgggcggagttaggggcgggactatggttgctgactaattgagatgcatgctttgcatacttctgcctgctggggagcctggggactttccacacctggttgctgactaattgagatgcatgctttgcatacttctgcctgctggggagcctggggactttccacaccctaactgacacacattccacagaattaattcgcgttaaatttttgttaaatcagctcattttttaaccaataggccgaaatcggcaaaatcccttataaatcaaaagaatagaccgagatagggttgagtgttgttccagtttggaacaagagtccactattaaagaacgtggactccaacgtcaaagggcgaaaaaccgtctatcagggcgatggcccactacgtgaaccatcaccctaatcaagttttttggggtcgaggtgccgtaaagcactaaatcggaaccctaaagggagcccccgatttagagcttgacggggaaagccggcgaacgtggcgagaaaggaagggaagaaagcgaaaggagcgggcgctagggcgctggcaagtgtagcggtcacgctgcgcgtaaccaccacacccgccgcgcttaatgcgccgctacagggcgcgtggggataccccctagagccccagctggttctttccgcctcagaagccatagagcccaccgcatccccagcatgcctgctattgtcttcccaatcctcccccttgctgtcctgccccaccccaccccccagaatagaatgacacctactcagacaatgcgatgcaatttcctcattttattaggaaaggacagtgggagtggcaccttccagggtcaaggaaggcacgggggaggggcaaacaacagatggctggcaactagaaggcacagtcgaggctgatcagcgggtttaaacgggccctgctagagattttccacactgactaaaagggtctgagggatctctagttaccagagtcacacaacagacgggcacacactacttgaagcactcaaggcaagctttattgaggcttaagcagtgggttccctagttagccagagagctcccaggctcagatctggtctaaccagagagacccagtacaagcaaaaagcagatcttgtcttcgttgggagtgaattagcccttccagtccccccttttcttttaaaaagtggctaagatctacagctgccttgtaagtcattggtcttaaagtcgacgcggggaggcggcccaaagggagatccgactcgtctgagggcgaaggcgaagacgcggaagaggccgcagagccggcagcaggccgcgggaaggaaggtccgctggattgagggccgaagggacgtagcagaaggacgtcccgcgcagaatccaggtggcaacacaggcgagcagccaaggaaaggacgatgatttccccgacaacaccacggaattgtcagtgcccaacagccgagcccctgtccagcagcgggcaaggcaggcggcgatgagttccgccgtggcaatagggagggggaaagcgaaagtcccggaaaggagctgacaggtggtggcaatgccccaaccagtgggggttgcgtcagcaaacacagtgcacaccacgccacgttgcctgacaacgggccacaactcctcataaagagacagcaaccaggatttatacaaggaggagaaaatgaaagccatacgggaagcaatagcatgatacaaaggcattaaagcagcgtatccacatagcgtaaaaggagcaacatagttaagaataccagtcaatctttcacaaattttgtaatccagaggttgattgtcgacttaacgcgttcaggcaccgggcttgcgggtcatgcaccaggtgcgcggtccttcgggcacctcgacgtcggcggtgacggtgaagccgagccgctcgtagaaggggaggttgcggggcgcggaggtctccaggaaggcgggcaccccggcgcgctcggccgcctccactccggggagcacgacggcgctgcccagacccttgccctggtggtcgggcgagactccgacggtggccaggaaccacgcgggctccttgggccggtgcggcgccaggaggccttccatctgttgctgcgcggccagccgggaaccgctcaactcggccatgcgcgggccgatctcggcgaacaccgcccccgcttcgacgctctccggcgtggtccagaccgccaccgcggcgccgtcgtccgcgacccacaccttgccgatgtcgagcccgacgcgcgtgaggaagagttcttgcagctcggtgacccgctcgatgtggcggtccggatcgacggtgtggcgcgtggcggggtagtcggcgaacgcggcggcgagggtgcgtacggccctggggacgtcgtcgcgggtggcgaggcgcaccgtgggcttgtactcggtcggtccaggattctcttcgacatctccggcttgtttcagcagagagaagtttgttgcgccggatccggcatagtcggggacatcatatgggtatgcataatcaggcacgtcgtagggataagcgtaatctggaacatcgtatgggtaggatccctttttcttttttgcctggccggcctttttcgtggccgccggccttttgtgcttcacgctggtctgggcgtactccagccactccttgttagagatggcgatcttcaccttatccagct
